(19) United States
(12) Patent Application Publication
(10) Pub. No.: US 2023/0127008 A1
(43) Pub. Date: Apr. 27, 2023

(54) STAT3-TARGETED BASE EDITOR THERAPEUTICS FOR THE TREATMENT OF MELANOMA AND OTHER CANCERS

(71) Applicants: The Broad Institute, Inc., Cambridge, MA (US); President and Fellows of Harvard College, Cambridge, MA (US)

(72) Inventors: David R. Liu, Cambridge, MA (US); Wei Hsi Yeh, Cambridge, MA (US)

(73) Assignees: The Broad Institute, Inc., Cambridge, MA (US); President and Fellows of Harvard College, Cambridge, MA (US)

(21) Appl. No.: 17/910,552

(22) PCT Filed: Mar. 10, 2021
(86) PCT No.: PCT/US2021/021781

§ 371 Date: Sep. 9, 2022

Related U.S. Application Data
(60) Provisional application No. 62/988,362, filed on Mar. 11, 2020.

(51) Int. Cl. C12N 15/90; C12N 15/11; C12N 9/22; C12N 9/78; A61P 17/00; A61P 35/00; A61K 38/46; A61K 31/7105; A61K 31/495; A61P 25/00

(52) U.S. Cl. CPC C12N 15/907; C12N 15/11; C12N 9/22; C12N 9/78; C12Y 305/04004; C12Y 305/04005; A61P 17/00; A61P 35/00; A61K 38/465; A61K 31/7105; A61K 31/495; A61P 25/00; C12N 2310/20; C12N 2800/80; C07K 2319/09

(57) ABSTRACT

The disclosure provides adenosine deaminases that are capable of deaminating adenosine in DNA to treat cancers, such as melanoma and glioblastoma. The disclosure also provides fusion proteins, guide RNAs and compositions comprising a Cas9 (e.g., a Cas9 nickase) domain and adenosine deaminases that deaminate adenosine in DNA, for example in a STAT3 gene. In some embodiments, adenosine deaminases provided herein are used to modify the STAT3 gene so that its protein product, STAT3, is unable to be activated. In some embodiments, the methods and compositions provided herein are used to treat melanoma or glioblastoma.

### RELATED APPLICATIONS

[0001] This invention claims the benefit of U.S. Provisional Application U.S. Ser. No. 62/988,362, filed Mar. 11, 2020, the contents of which are incorporated herein by reference.

### GOVERNMENT SUPPORT

[0002] This invention was made with government support under HR0011-17-2-0049 awarded by DARPA. The government has certain rights in the invention.

### BACKGROUND OF THE INVENTION

[0003] Signal transducer and activator of transcription 3 (also known as “STAT3”) plays a pivotal role in different biological processes, such as cell proliferation, survival, immune responses, apoptosis, inflammation, and differentiation. See FIG. 1A. Under physiological conditions, STAT3 is transiently activated; however, STAT3 is persistently activated in a number of solid and hematopoietic malignancies, leading to the promotion of tumor progression. In addition to the transcriptional pathways by which STAT3 promotes survival, proliferation, metastatic potential, and immune evasion of cancer cells, cytoplasmic STAT3 promotes tumor growth via metabolic and other non-transcriptional mechanisms.

[0004] STAT3 comprises an amino terminal domain (NH₂), a coiled-coil domain (CCD) for binding with interactive proteins, a DNA-binding domain (DBD), an alpha-helical linker domain, a SRC homology 2 (SH2) domain for phosphorylation and dimerization, and a C-terminal transactivation domain (FIG. 1B). Typically, overexpressed cytokine receptors (e.g., interleukin-6 receptor and interleukin-10 receptors) and hyperactive growth factor receptors (e.g., epidermal growth factor receptor, fibroblast growth factor receptor, and insulin-like growth factor receptor) trigger the tyrosine phosphorylation cascade through the binding of ligands to their respective receptors. The bound receptors form dimers and successively recruit glycoprotein 130 (gp130) and Janus kinases (JAKs), leading to the phosphorylation and activation of the JAKs. The activated JAKs phosphorylate the cytoplasmic tyrosine residues of the receptors, which then interact with the SH2 domain of STAT3, phosphorylating the tyrosine 705 (Y705) residue of STAT3. STAT3 may also be phosphorylated and activated by nonreceptor tyrosine kinases, such as Src and Abl. Phosphorylated STAT3 then forms a homodimer through the interaction of the phosphorylated Y705 site and SH2 domain with another phosphorylated STAT3. Homodimerization triggers dissociation of the STAT3 dimer from the cell surface receptors, and it proceeds to translocate from the cytoplasm to the nucleus. In the nucleus, the STAT3 homodimer, with a variety of coactivator proteins, including NCOA/SRC1a, apurinic/apyrimidinic endonuclease-1/redox factor-1 (APE/Ref-1), and CREB-binding protein (CBP)/p300, binds to specific DNA sequences, activating the transcription of genes related to various phenotypes of cancer cells (e.g., Bcl, cyclins, D1/D2, c-Myc, Mcl-1, VEGF). Phosphorylation of STAT3's 727 serine (S727) stimulates transcriptional activity. The STAT3 pathway is depicted in FIG. 1A.

[0005] STAT3 is frequently phosphorylated on tyrosine 705 at basal levels in cancer cells. The protein has been found to be constitutively activated in over 70% of human cancers, including melanoma and glioblastoma multiforme (GBM). As such, STAT3 has been found to be a critical mediator of tumorigenesis and tumor progression, while suppressing antitumor immune responses.

[0006] Melanoma is the most deadly form of skin cancer, and its incidence rate is rising faster than that of any other cancer worldwide. It has been found that the pathway controlled by the STAT3 protein relates to the promotion of metastasis, angiogenesis, immune evasion, and a cancer-initiating cell phenotype. See, e.g., Lesinski, “The potential for targeting the STAT3 pathway as a novel therapy for melanoma” Future Oncol., 2013 July; 9(7): 925-927; the entire contents of which are hereby incorporated by reference. STAT3 itself has been found to be required for survival in melanoma cells. Current treatment strategies under investigation relating to STAT3 inhibition include inhibition of kinases upstream of STAT3 (e.g., Jak2), targeting STAT3 protein with siRNA, shRNA vectors, small molecules, platinum-based compounds or peptide aptamers; however, none of these have advanced beyond the preclinical stage.

[0007] Glioblastoma multiforme (GBM) is the most common type of primary brain tumor, and the current standard-of-care for GBM patients includes maximal surgical resection, followed by adjuvant radiotherapy and temozolomide (TMZ), a methylator drug. Current treatments are palliative; therefore, there exists a need for curative treatment. Activation of STAT3 has been shown to have a positive correlation with tumor histopathological grade, and the inhibition of STAT3 has been found to improve chemotherapy outcomes in mice with GBM (Alvarez et al., 2004; Yu et al., 2009; Wang et al., 2009; Han et al., 2016). These inhibiting compounds have not translated well in human studies and have failed Phase III trials.

[0008] Because of STAT3's central role in basic cellular functions, such as cell proliferation, differentiation, apoptosis, angiogenesis, immune response, and metastasis, which impact cancers, such as melanoma and glioblastoma multiforme, STAT3 represents a rational drug target for the development of novel anti-cancer therapeutics. In general, STAT3 inhibitors can target STAT3 inactivation either directly or indirectly in a variety of ways. For example, direct inhibitors can target the SH2 domain, DNA binding domain, and the N-terminal domain. Inhibition of these domains can regulate STAT3 activation by blocking phosphorylation, dimerization, nuclear translocation, and DNA binding of the STAT3 protein, thereby disrupting its ultimate action on upregulating DNA transcription of genes that contribute to the state of STAT3-dependent cancers. Indirect inhibitors target upstream points of intervention that disrupt STAT3-signaling, such as by inhibiting the tyrosine kinases that phosphorylate STAT3 (e.g., JAK and Src kinases). These possible therapeutic intervention strategies are depicted in FIG. 1C, which illustrates a number of strategies for inhibiting the activation of STAT3 signaling, including: (1) targeting upstream regulators of STAT3, (2) inhibitors that bind to the SH2 domain of STAT3 to inhibit its activation, (3) inhibiting STAT3 phosphorylation or acetylation, (4) inhibiting the DNA binding domain of STAT3 to block STAT3-DNA binding, (5) inhibiting binding of STAT3 with co-activators, (6) modulating the binding of STAT3 with interactive proteins needed for signaling, and (7) promoting STAT3 ubiquitination and proteasomal degradation. See Qin et al., “STAT3 as a potential therapeutic target in triple negative breast cancer: a systematic review,” Journal of Experimental & Clinical Cancer Research, 2019, 38: 195, the contents of which are incorporated herein by reference. These strategies have been the focus of a variety of anti-cancer therapeutics, a review of which can be found in Lee et al., “Highlighted STAT3 as a potential drug target for cancer therapy,” BMB Rep., 2019, 52(7): 415-423, the contents of which are incorporated herein by reference.

[0009] While STAT3-targeted therapies have been developed and shown to have efficacy in preclinical models in vitro and in vivo against a wide array of cancers (e.g., Qin et al.), such therapies by their nature are not curative and require repeat dosing to remain effective. Alternative genetic approaches to targeting STAT3 over-activation that are more curative in nature are highly desired and would significantly advance the art.

### SUMMARY OF THE INVENTION

[0010] Provided herein are compositions, kits, and methods of modifying a polynucleotide (e.g., DNA) using a deaminase (e.g., a cytidine deaminase or an adenosine deaminase) and a nucleic acid programmable DNA binding protein (“napDNAbp”) to treat cancers, such as melanoma and glioblastoma multiforme (GBM), which are characterized as having aberrant activation of Signal Transducer and Activator of Transcription 3 (“STAT3”), a cytoplasmic transcription factor that regulates an array of cellular processes, such as cell proliferation, differentiation, apoptosis, angiogenesis, inflammation, and the immune response, that impact cancer progression. In some embodiments, the napDNAbp is a Cas9 nuclease, such as SpCas9, or an ortholog, homolog, or variant thereof, which when complexed with a suitable guide RNA is effective in treating cancers associated with aberrant STAT3 signaling by installing one or more edits (e.g., insertion, deletion, or replacement of one or more nucleobases) in the STAT3 genomic locus.

[0011] The present disclosure relates in part to the discovery that base editing of the STAT3 genomic locus may be used to effectively generate modified STAT3 protein variants that have a reduced or impaired ability of becoming phosphorylated. In turn, these STAT3 variants are capable of inhibiting, reducing, or otherwise blocking STAT3 signaling. In certain embodiments, these STAT3 variants may be referred to as “phosphorylation-deficient” STAT3 variants and include variants having one or more amino acid substitutions that block, inhibit, or otherwise reduce phosphorylation of STAT3 at one or more sites of phosphorylation, including Tyr705 and Ser727 of the canonical STAT3 protein, known as STAT3a, a 770 amino acid, 92 kDa protein represented by SEQ ID NO: 33 and having the following amino acid sequence:

(SEQ ID NO: 33)
MAQWNQLQQLDTRYLEQLHQLYSDSFPMELRQFLAPWIESQDWAYAASKE
SHATLVFHNLLGEIDQQYSRFLQESNVLYQHNLRRIKQFLQSRYLEKPME
IARIVARCLWEESRLLQTAATAAQQGGQANHPTAAVVTEKQQMLEQHLQD
VRKRVQDLEQKMKVVENLQDDFDFNYKTLKSQGDMQDLNGNNQSVTRQKM
QQLEQMLTALDQMRRSIVSELAGLLSAMEYVQKTLTDEELADWKRRQQIA
CIGGPPNICLDRLENWITSLAESQLQTRQQIKKLEELQQKVSYKGDPIVQ
HRPMLEERIVELFRNLMKSAFVVERQPCMPMHPDRPLVIKTGVQFTTKVR
LLVKFPELNYQLKIKVCIDKDSGDVAALRGSRKFNILGTNTKVMNMEESN
NGSLSAEFKHLTLREQRCGNGGRANCDASLIVTEELHLITFETEVYHQGL
KIDLETHSLPVVVISNICQMPNAWASILWYNMLTNNPKNVNFFTKPPIGT
WDQVAEVLSWQFSSTTKRGLSIEQLTTLAEKLLGPGVNYSGCQITWAKFC
KENMAGKGFSFWVWLDNIIDLVKKYILALWNEGYIMGFISKERERAILST
KPPGTFLLRFSESSKEGGVTFTWVEKDISGKTQIQSVEPYTKQQLNNMSF
AEIIMGYKIMDATNILVSPLVYLYPDIPKEEAFGKYCRPESQEHPEADPG
SAAP [symbol] LKTKFICVTPTTCSNTIDLPM [symbol] PRTLDSLMQFGNNGEGAEPSAGG
QFESLTFDMELTSECATSPM, wherein [symbol] 705 and [symbol] 727 are in
bold underline.

[0012] In some embodiments, the STAT3 protein can be a polypeptide having an amino acid sequence having at least 80%, or at least 81%, or at least 82%, or at least 83%, or at least 84%, or at least 85%, or at least 86%, or at least 87% or at least 88%, or at least 89%, or at least 90%, or at least 91%, or at least 92%, or at least 93%, or at least 94%, or at least 95%, or at least 96%, or at least 97%, or at least 98%, or at least 99%, or up to 100% sequence identity with SEQ ID NO: 33.

[0013] In certain embodiments, the disclosure provides phosphorylation-deficient STAT3 variants having one or more amino acid substitutions that block, inhibit, or otherwise reduce phosphorylation of STAT3 at one or more sites of phosphorylation, including Tyr705 and Ser727 of the canonical STAT3 protein (SEQ ID NO: 33). In some embodiments, the one or more amino acid substitutions that block, inhibit, or otherwise reduce phosphorylation of STAT3 may comprise an amino acid substitution at one or more phosphorylation sites (e.g., a substitution at Tyr705 and/or Ser727), or alternately, the amino acid substitution may be at one or more residues that inhibit, reduce, or otherwise block phosphorylation of a phosphorylation site of STAT3, e.g., Tyr705 and/or Ser727 of STAT3, but which are sites that are not themselves phosphorylated. In other words, phosphorylation of STAT3 may be inhibited, reduced, or blocked by altering using the base editors disclosed herein one or more amino acids in STAT3—including actual phosphorylation sites, including Tyr705 and Ser727, or amino acid sites that are not themselves phosphorylated but which block, inhibit, or otherwise reduce phosphorylation of STAT3.

[0014] STAT3 is known to comprise two important phorsphorylation sites, Tyr705 and Ser727, for its activation. Sakaguchi et al., “Role and Regulation of STAT3 Phosphorylation at Ser727 in Melanocytes and Melanoma Cells, J Invest Dermat, Vol. 132, No. 7, July 2012, pages 1877-1885, which is incorporated herein by reference. Through the use of base-editing that targets and modifies the nucleotide sequence of the STAT3 genomic locus at one or more sites, the resulting STAT3 protein variants expressed therefrom have a reduced or impaired ability of being phosphorylated, e.g., at positions 705 and/or 727 of the canonical STAT3 protein. Because phosphorylation of the STAT3 variant is reduced, inhibited, or otherwise blocked, STAT3 signaling is concomitantly reduced, inhibited, or otherwise blocked. In various emodiments, the phosphorylation-deficient STAT3 variants may include dominant-negative STAT3 variants.

[0015] Aspects of the disclosure provide compositions, kits, and methods for modifying a polynucleotide (e.g., DNA) using a deaminase (e.g., a cytidine or adenosine deaminase) and a nucleic acid programmable DNA binding protein (e.g., Cas9) to base-edit STAT3 to generate a phosphorylation-deficient STAT3 variant (e.g., a dominant negative STAT3 variant). Such deaminases are described in International Application No.: PCT/US2017/045,381 (WO 2018/027078), filed Aug. 3, 2017; PCT/US2018/056146 (WO 2019/079347), filed Oct. 16, 2018; PCT/US2019/033848 (WO 2019/226953), filed May 23, 2019; PCT/US2019/018285 (WO 2019/161251), filed Feb. 15, 2019; and PCT/US2019/019794 (WO 2019/168953), filed Feb. 27, 2019; the entire contents of which are hereby incorporated by reference. In some embodiments, fusion proteins provided herein (e.g., adenosine base editors (ABEs) or cytidine base editors (CBEs)) are used to generate an Y705 and/or S727 substitution (e.g., Y705F and Y705H), resulting in a STAT3 that cannot be phosphorylated (e.g., a dominant negative STAT3 comprising a Y705 and/or S727 substitution). For example, the disclosure provides methods and compositions for generating an Y705F or Y705H dominant negative STAT3. A skilled artisan would appreciate that any of these mutations result in a STAT3 that cannot be phosphorylated (e.g., a dominant negative STAT3 variant), or alternately, a STAT3 whose ability to be phosphorylated is diminished or blocked. In some embodiments, the fusion protein (e.g., adenosine base editor or cytidine base editor) is delivered in vivo, to a subject. In some embodiments, the fusion protein is delivered in two or more parts, for example, by using a split-intein strategy that allows for separate delivery and expression in a cell of fusion protein subcomponents comprising split-inteins, wherein the complete or fully functional fusion protein becomes reassembled in a cell. In some embodiments, use of fusion protein disclosed herein (e.g., an adenosine base editor or cytidine base editor) results in a decrease, e.g., at least 5%, 10%, 20%, 30%, 40%, 50%, 60%, 70%, 80%, 90%, or 95% decrease in a level of active STAT3 in a subject, in an organ of a subject (e.g., brain or skin), or in a cell of a subject.

[0016] In some embodiments, the disclosure provides compositions comprising a fusion protein (e.g., adenosine base editor or cytidine base editor) and a guide RNA (gRNA). In some embodiments, the gRNA directs the fusion protein in proximity to a STAT3 gene. In some embodiments, the gRNA directs the fusion protein within 1, 2, 3, 4, 5, 6, 7, 8, 9, 10, 11, 12, 13, 14, 15, 16, 17, 18, 19, or 20 base pairs of a codon encoding Y705 or S727 within a STAT3 gene. In some embodiments, the gRNA comprises a sequence selected from the group consisting of: 5′-TGCCCCA [symbol] ACCTGAAGACCA-3′ (SEQ ID NO: 11), 5′-TTCAGGTA [symbol] GGGGCAGCGCC-3′ (SEQ ID NO: 12), and 5′-CAGGTA [symbol] GGGGCAGCGCCTG-3′ (SEQ ID NO: 13), where the nucleotide target is indicated in bold underline, which are human Y705 target guide sequences. It should be appreciated that the T's indicated in the gRNA sequence are uracils (Us) in the RNA sequence. Accordingly, in some embodiments, the gRNA comprises a sequence selected from the group consisting of: 5′-UGCCCCA [symbol] ACCUGAAGACCA-3′ (SEQ ID NO: 14), 5′-UUCAGGUA [symbol] GGGGCAGCGCC-3′ (SEQ ID NO: 15), and 5′-CAGGUA [symbol] GGGGCAGCGCCUG-3′ (SEQ ID NO: 16), which are the corresponding spacer sequences in the guide RNAs for targeting human Y705.

[0017] In some embodiments, the gRNA comprises a sequence selected from the group consisting of: 5′-TGCCCCG [symbol] ACCTGAAGACCA-3′ (SEQ ID NO: 17), 5′-AGG [symbol] ACGGGGCAGCACCTGC-3′ (SEQ ID NO: 18), and 5′-TTCAGG [symbol] ACGGGGCAGCACC-3′ (SEQ ID NO: 19), where the nucleotide target is indicated in bold, which are mouse Y705 target guide sequences. It should be appreciated that the T's indicated in the gRNA sequence are uracils (Us) in the RNA sequence. Accordingly, in some embodiments, the gRNA comprises a sequence selected from the group consisting of: 5′-UGCCCCG [symbol] ACCUGAAGACCA-3′ (SEQ ID NO: 20), 5′-AGG [symbol] ACGGGGCAGCACCUGC-3′ (SEQ ID NO: 21), and 5′-UUCAGG [symbol] ACGGGGCAGCACC-3′ (SEQ ID NO: 22), which are the corresponding spacer sequences in the guide RNAs for targeting mouse Y705.

[0018] Methods and compositions provided herein, in some embodiments, are used to treat a subject having or a subject suspected of having a cancer (e.g., melanoma or glioblastoma), and in particular, a STAT3-dependent cancer.

[0019] Thus, in some aspects, the base editor and guide RNA complexes described herein may be useful for treating a disease or a disorder resulting from STAT3, i.e., a STAT3-dependent cancer. In some embodiments, the disorder is a cancer (e.g., melanoma or glioblastoma). In some embodiments involving an adenosine base editor, deaminating the adenosine nucleobase in the STAT3 gene results in a T:A base pair in the STAT3 gene being mutated to a C:G base pair in the STAT3 gene (a transition substitution of an “A” to a “G”). In some embodiments, deaminating the adenosine nucleobase in the STAT3 gene leads to a decrease in active STAT3 protein (e.g., results in the generation of a dominant negative STAT3 protein). In some embodiments, deaminating the adenosine nucleobase in the STAT3 gene ameliorates one or more symptoms of a cancer (e.g., melanoma or glioblastoma).

[0020] In other embodiments involving a cytidine base editor, base editing results in a C:G base pair in the STAT3 gene being substituted with a T:A base pair in the STAT3 gene (a transition substitution of a “C” with a “T”). In some embodiments, deaminating a cytidine nucleobase in the STAT3 gene leads to a decrease in active STAT3 protein (e.g., results in the generation of a dominant negative STAT3 protein). In some embodiments, deaminating a cytidine nucleobase in the STAT3 gene ameliorates one or more symptoms of a cancer (e.g., melanoma or glioblastoma).

[0021] In some embodiments, the STAT3 is signal transducer and activator of transcription 3 from Homo sapiens. For example, Gene ID: 6674, which may also be referred to as APRF, HIES, ADMIO, or ADMIO1. See, for example, NG_007370.1.

[0022] It should be appreciated that the foregoing concepts, and additional concepts discussed below, may be arranged in any suitable combination, as the present disclosure is not limited in this respect. Further, other advantages and novel features of the present disclosure will become apparent from the following detailed description of various non-limiting embodiments when considered in conjunction with the accompanying Figures.

### BRIEF DESCRIPTION OF THE DRAWINGS

[0023] The following Figures form part of the present specification and are included to further demonstrate certain aspects of the present disclosure, which can be better understood by reference to one or more of these drawings in combination with the detailed description of specific embodiments presented herein.

[0024] FIG. 1A illustrates that STAT3 signaling pathway in cancer cells. Under normal physiological conditions, the activation of STAT3 is regulated by endogenous inhibitors (e.g., PIAS—protein inhibitor of activated STAT; SOCS—the suppressor of cytokine signaling; and PTPs—protein tyrosine phosphatases). Under cancer conditions, there is an increase in cytokines, such as IL-6, and/or growth factors (e.g., EGF, FGF, and VEGF), which bind to cell surface receptors that cause the phosphorylation of JAK and Src tyrosine kinases. The JAK and Src tyrosine kinases then phosphorylate STAT3, thereby activating the protein to dimerize and causing it to translocate from the cytoplasm to the nucleus where it further binds to DNA, along with its coactivators, and induces transcription of its target genes that promote growth, metastasis, chemoresistance, immune escape, and angiogenesis. See Qin et al., Journal of Experimental & Clinical Cancer Research, 2019, 38: 195, the contents of which are incorporated herein by reference.

[0025] FIG. 1B illustrates the structure of STAT3, including the position of the Y705 and S727 substitutions.

[0026] FIG. 1C illustrates therapeutic intervention strategies for inhibiting the activation of STAT3 signaling, including: (1) targeting upstream regulators of STAT3; (2) inhibitors that bind to the SH2 domain of STAT3 to inhibit its activation; (3) inhibiting STAT3 phosphorylation or acetylation; (4) inhibiting the DNA binding domain of STAT3 to block STAT3-DNA binding; (5) inhibiting binding of STAT3 with co-activators; (6) modulating the binding of STAT3 with interactive proteins needed for signaling; and (7) promoting STAT3 ubiquitination and proteasomal degradation. See Qin et al., Journal of Experimental & Clinical Cancer Research, 2019, 38: 195, the contents of which are incorporated herein by reference.

[0027] FIG. 2 illustrates the expression levels of different STAT3 variants in a reporter system. Note that STAT3C is a positive control for the upregulation of STAT3 and comprises two cysteine mutations.

[0028] FIG. 3 shows inhibition of STAT3 using a STAT3 inhibitor at different concentrations. Stattic, a selective inhibitor of STAT3, prevents binding of tyrosine-phosphorylated peptide motifs to the STAT3 SH2 domain. The chemical structure of stattic is also shown.

[0029] FIGS. 4A-4C show in vitro data demonstrating the use of a base editor to turn off STAT3. FIG. 4A shows the levels of 705H-sgRNA after transfection with the adenosine base editor (ABE). FIG. 4B is a Western blot, demonstrating a reduction in phosphorylated STAT3 using the ABE system. FIG. 4C shows the sequences and percentages of reads after each day during the experiment shown in FIG. 3A.

[0030] FIG. 5 is an extension of the graph of FIG. 3, demonstrating that treatment with an ABE reduces the STAT3 signal over time, whereas treatment with a STAT3 inhibitor (stattic) does not lead to a durable effect.

[0031] FIG. 6 shows Y705H editing in a cell line (flasks).

[0032] FIG. 7 is a schematic depicting the two sites of phosphorylation on the mouse STAT3 gene. Representative potential sgRNA constructs are also shown.

[0033] FIG. 8 is a schematic depicting the Y705 site of phosphorylation on the human STAT3 gene. Potential target guide sequences are also illustrated. When screened, 83% of the sequences were found to be modified, as shown in the lower image.

[0034] FIG. 9 is a graph showing that gene editing of STAT3 successfully reduced the STAT3 signal in glioblastoma cells in vitro.

### DEFINITIONS

[0035] As used herein and in the claims, the singular forms “a,” “an,” and “the” include the singular and the plural unless the context clearly indicates otherwise. Thus, for example, a reference to “an agent” includes a single agent and a plurality of such agents.

### AAV

[0036] An “adeno-associated virus” or “AAV” is a virus which infects humans and some other primate species. The wild-type AAV genome is a single-stranded deoxyribonucleic acid (ssDNA), either positive- or negative-sensed. The genome comprises two inverted terminal repeats (ITRs), one at each end of the DNA strand, and two open reading frames (ORFs): rep and cap between the ITRs. The rep ORF comprises four overlapping genes encoding Rep proteins required for the AAV life cycle. The cap ORF comprises overlapping genes encoding capsid proteins: VP1, VP2 and VP3, which interact together to form the viral capsid. VP1, VP2 and VP3 are translated from one mRNA transcript, which can be spliced in two different manners: either a longer or shorter intron can be excised, resulting in the formation of two isoforms of mRNAs: a ˜2.3 kb- and a ˜2.6 kb-long mRNA isoform. The capsid forms a supramolecular assembly of approximately 60 individual capsid protein subunits into a non-enveloped, T-1 icosahedral lattice capable of protecting the AAV genome. The mature capsid is composed of VP1, VP2, and VP3 (molecular masses of approximately 87, 73, and 62 kDa respectively) in a ratio of about 1:1:10. rAAV particles may comprise a nucleic acid vector (e.g., a recombinant genome), which may comprise at a minimum: (a) one or more heterologous nucleic acid regions comprising a sequence encoding a protein or polypeptide of interest (e.g., a split Cas9 or split nucleobase) or an RNA of interest (e.g., a gRNA), or one or more nucleic acid regions comprising a sequence encoding a Rep protein; and (b) one or more regions comprising inverted terminal repeat (ITR) sequences (e.g., wild-type ITR sequences or engineered ITR sequences) flanking the one or more nucleic acid regions (e.g., heterologous nucleic acid regions). In some embodiments, the nucleic acid vector is between 4 kb and 5 kb in size (e.g., 4.2 to 4.7 kb in size). In some embodiments, the nucleic acid vector further comprises a region encoding a Rep protein. In some embodiments, the nucleic acid vector is circular. In some embodiments, the nucleic acid vector is single-stranded. In some embodiments, the nucleic acid vector is double-stranded. In some embodiments, a double-stranded nucleic acid vector may be, for example, a self-complimentary vector that contains a region of the nucleic acid vector that is complementary to another region of the nucleic acid vector, initiating the formation of the double-strandedness of the nucleic acid vector.

### Adenosine Deaminase (or Adenine Deaminase)

[0037] As used herein, the term “adenosine deaminase” or “adenosine deaminase domain” refers to a protein or enzyme that catalyzes a deamination reaction of an adenosine (or adenine). The terms “adenosine” and “adenine” are used interchangeably for purposes of the present disclosure. For example, for purposes of the disclosure, reference to an “adenine base editor” (ABE) can refer to the same entity as an “adenosine base editor” (ABE). Similarly, for purposes of the disclosure, reference to an “adenine deaminase” can refer to the same entity as an “adenosine deaminase.” However, the person having ordinary skill in the art will appreciate that “adenine” refers to the purine base whereas “adenosine” refers to the larger nucleoside molecule that includes the purine base (adenine) and sugar moiety (e.g., either ribose or deoxyribose). In certain embodiments, the disclosure provides base editor fusion proteins comprising one or more adenosine deaminase domains. For instance, an adenosine deaminase domain may comprise a heterodimer of a first adenosine deaminase and a second deaminase domain, connected by a linker. Adenosine deaminases (e.g., engineered adenosine deaminases or evolved adenosine deaminases) provided herein may be enzymes that convert adenine (A) to inosine (I) in DNA or RNA. Such adenosine deaminase can lead to an A:T to G:C base pair conversion. In some embodiments, the deaminase is a variant of a naturally-occurring deaminase from an organism. In some embodiments, the deaminase does not occur in nature. For example, in some embodiments, the deaminase is at least 50%, at least 55%, at least 60%, at least 65%, at least 70%, at least 75% at least 80%, at least 85%, at least 90%, at least 95%, at least 96%, at least 97%, at least 98%, at least 99%, or at least 99.5% identical to a naturally-occurring deaminase.

[0038] In some embodiments, the adenosine deaminase is derived from a bacterium, such as, E. coli, S. aureus, S. typhi, S. putrefaciens, H. influenzae, or C. crescentus. In some embodiments, the adenosine deaminase is a TadA deaminase. In some embodiments, the TadA deaminase is an E. coli TadA deaminase (ecTadA). In some embodiments, the TadA deaminase is a truncated E. coli TadA deaminase. For example, the truncated ecTadA may be missing one or more N-terminal amino acids relative to a full-length ecTadA. In some embodiments, the truncated ecTadA may be missing 1, 2, 3, 4, 5, 6, 7, 8, 9, 10, 11, 12, 13, 14, 15, 6, 17, 18, 19, or 20 N-terminal amino acid residues relative to the full length ecTadA. In some embodiments, the truncated ecTadA may be missing 1, 2, 3, 4, 5, 6, 7, 8, 9, 10, 11, 12, 13, 14, 15, 6, 17, 18, 19, or 20 C-terminal amino acid residues relative to the full length ecTadA. In some embodiments, the ecTadA deaminase does not comprise an N-terminal methionine. Reference is made to U.S. Patent Publication No. 2018/0073012, published Mar. 15, 2018, which is incorporated herein by reference.

### Antisense Strand

[0039] In genetics, the “antisense” strand of a segment within double-stranded DNA is the template strand, and which is considered to run in the 3′ to 5′ orientation. By contrast, the “sense” strand is the segment within double-stranded DNA that runs from 5′ to 3′, and which is complementary to the antisense strand of DNA, or template strand, which runs from 3′ to 5′. In the case of a DNA segment that encodes a protein, the sense strand is the strand of DNA that has the same sequence as the mRNA, which takes the antisense strand as its template during transcription, and eventually undergoes (typically, not always) translation into a protein. The antisense strand is thus responsible for the RNA that is later translated to protein, while the sense strand possesses a nearly identical makeup to that of the mRNA. Note that for each segment of dsDNA, there will possibly be two sets of sense and antisense, depending on which direction one reads (since sense and antisense is relative to perspective). It is ultimately the gene product, or mRNA, that dictates which strand of one segment of dsDNA is referred to as sense or antisense.

### Base Editing

[0040] “Base editing” refers to genome editing technology that involves the conversion of a specific nucleic acid base into another at a targeted genomic locus. In certain embodiments, this can be achieved without requiring double-stranded DNA breaks (DSB), or single stranded breaks (i.e., nicking). To date, other genome editing techniques, including CRISPR-based systems, begin with the introduction of a DSB at a locus of interest. Subsequently, cellular DNA repair enzymes mend the break, commonly resulting in random insertions or deletions (indels) of bases at the site of the DSB. However, when the introduction or correction of a point mutation at a target locus is desired rather than stochastic disruption of the entire gene, these genome editing techniques are unsuitable, as correction rates are low (e.g. typically 0.1% to 5%), with the major genome editing products being indels. In order to increase the efficiency of gene correction without simultaneously introducing random indels, the present inventors previously modified the CRISPR/Cas9 system to directly convert one DNA base into another without DSB formation. See, Komor, A. C., et al., Programmable editing of a target base in genomic DNA without double-stranded DNA cleavage. Nature 533, 420-424 (2016), the entire contents of which is incorporated by reference herein.

### Base Editor

[0041] The term “base editor (BE)” as used herein, refers to an agent comprising a polypeptide that is capable of making a modification to a base (e.g., A, T, C, G, or U) within a nucleic acid sequence (e.g., DNA or RNA) that converts one base to another (e.g., A to G, A to C, A to T, C to T, C to G, C to A, G to A, G to C, G to T, T to A, T to C, T to G). In some embodiments, the base editor is capable of deaminating a base within a nucleic acid such as a base within a DNA molecule. In the case of an adenine base editor, the base editor is capable of deaminating an adenine (A) in DNA. Such base editors may include a nucleic acid programmable DNA binding protein (napDNAbp) fused to an adenosine deaminase. Some base editors include CRISPR-mediated fusion proteins that are utilized in the base editing methods described herein. In some embodiments, the base editor comprises a nuclease-inactive Cas9 (dCas9) fused to a deaminase which binds a nucleic acid in a guide RNA-programmed manner via the formation of an R-loop, but does not cleave the nucleic acid. For example, the dCas9 domain of the fusion protein may include a D10A and a H840A mutation (which renders Cas9 capable of cleaving only one strand of a nucleic acid duplex), as described in PCT/US2016/058344, which published as WO 2017/070632 on Apr. 27, 2017 and is incorporated herein by reference in its entirety. The DNA cleavage domain of S. pyogenes Cas9 includes two subdomains, the HNH nuclease subdomain and the RuvC1 subdomain. The HNH subdomain cleaves the strand complementary to the gRNA (the “targeted strand”, or the strand in which editing or deamination occurs), whereas the RuvC1 subdomain cleaves the non-complementary strand containing the PAM sequence (the “non-edited strand”). The RuvC1 mutant D10A generates a nick in the targeted strand, while the HNH mutant H840A generates a nick on the non-edited strand (see Jinek et al., Science, 337:816-821(2012); Qi et al., Cell. 28; 152(5):1173-83 (2013)).

[0042] In some embodiments, a nucleobase editor is a macromolecule or macromolecular complex that results primarily (e.g., more than 80%, more than 85%, more than 90%, more than 95%, more than 99%, more than 99.9%, or 100%) in the conversion of a nucleobase in a polynucleic acid sequence into another nucleobase (i.e., a transition or transversion) using a combination of 1) a nucleotide-, nucleoside-, or nucleobase-modifying enzyme; and 2) a nucleic acid binding protein that can be programmed to bind to a specific nucleic acid sequence.

[0043] In some embodiments, the nucleobase editor comprises a DNA binding domain (e.g., a programmable DNA binding domain such as a dCas9 or nCas9) that directs it to a target sequence. In some embodiments, the nucleobase editor comprises a nucleobase modifying enzyme fused to a programmable DNA binding domain (e.g., a dCas9 or nCas9). A “nucleobase modifying enzyme” is an enzyme that can modify a nucleobase and convert one nucleobase to another (e.g., a deaminase such as a cytidine deaminase or a adenosine deaminase). In some embodiments, the nucleobase editor may target cytosine (C) bases in a nucleic acid sequence and convert the C to thymine (T) base. In some embodiments, the C to T editing is carried out by a deaminase, e.g., a cytidine deaminase. Base editors that can carry out other types of base conversions (e.g., adenosine (A) to guanine (G), C to G) are also contemplated.

[0044] Nucleobase editors that convert a C to T, in some embodiments, comprise a cytidine deaminase. A “cytidine deaminase” refers to an enzyme that catalyzes the chemical reaction “cytosine+H₂O→uracil+NH₃” or “5-methyl-cytosine+H₂O→thymine+NH₃.” As it may be apparent from the reaction formula, such chemical reactions result in a C to U/T nucleobase change. In the context of a gene, such a nucleotide change, or mutation, may in turn lead to an amino acid change in the protein, which may affect the protein's function, e.g., loss-of-function or gain-of-function. In some embodiments, the C to T nucleobase editor comprises a dCas9 or nCas9 fused to a cytidine deaminase. In some embodiments, the cytidine deaminase domain is fused to the N-terminus of the dCas9 or nCas9. In some embodiments, the nucleobase editor further comprises a domain that inhibits uracil glycosylase, and/or a nuclear localization signal. Such nucleobase editors have been described in the art, e.g., in Rees & Liu, Nat Rev Genet. 2018; 19(12):770-788 and Koblan et al., Nat Biotechnol. 2018; 36(9):843-846; as well as. U.S. Patent Publication No. 2018/0073012, published Mar. 15, 2018, which issued as U.S. Pat. No. 10,113,163; on Oct. 30, 2018; U.S. Patent Publication No. 2017/0121693, published May 4, 2017, which issued as U.S. Pat. No. 10,167,457 on Jan. 1, 2019; International Publication No. WO 2017/070633, published Apr. 27, 2017; U.S. Patent Publication No. 2015/0166980, published Jun. 18, 2015; U.S. Pat. No. 9,840,699, issued Dec. 12, 2017; U.S. Pat. No. 10,077,453, issued Sep. 18, 2018; International Publication No. WO 2019/023680, published Jan. 31, 2019; International Publication No. WO 2018/0176009, published Sep. 27, 2018, International Application No PCT/US2019/033848, filed May 23, 2019, International Application No. PCT/US2019/47996, filed Aug. 23, 2019; International Application No. PCT/US2019/049793, filed Sep. 5, 2019; U.S. Provisional Application No. 62/835,490, filed Apr. 17, 2019; International Application No. PCT/US2019/61685, filed Nov. 15, 2019; International Application No. PCT/US2019/57956, filed Oct. 24, 2019; U.S. Provisional Application No. 62/858,958, filed Jun. 7, 2019; International Publication No. PCT/US2019/58678, filed Oct. 29, 2019, the contents of each of which are incorporated herein by reference in their entireties.

[0045] In some embodiments, a nucleobase editor converts an A to G. In some embodiments, the nucleobase editor comprises an adenosine deaminase. An “adenosine deaminase” is an enzyme involved in purine metabolism. It is needed for the breakdown of adenosine from food and for the turnover of nucleic acids in tissues. Its primary function in humans is the development and maintenance of the immune system. An adenosine deaminase catalyzes hydrolytic deamination of adenosine (forming inosine, which base pairs as G) in the context of DNA. There are no known adenosine deaminases that act on DNA. Instead, known adenosine deaminase enzymes only act on RNA (tRNA or mRNA). Evolved deoxyadenosine deaminase enzymes that accept DNA substrates and deaminate dA to deoxyinosine have been described, e.g., in PCT Application PCT/US2017/045381, filed Aug. 3, 2017, which published as WO 2018/027078, and PCT Application No. PCT/US2019/033848, which published as WO 2019/226953, each of which is herein incorporated by reference by reference.

[0046] Exemplary adenine base editors (ABEs) (or “adenosine base editors”) and cytidine base editors (CBEs) (or “cytosine base editors”) are also described in Rees & Liu, Base editing: precision chemistry on the genome and transcriptome of living cells, Nat. Rev. Genet. 2018; 19(12):770-788; as well as U.S. Patent Publication No. 2018/0073012, published Mar. 15, 2018, which issued as U.S. Pat. No. 10,113,163, on Oct. 30, 2018; U.S. Patent Publication No. 2017/0121693, published May 4, 2017, which issued as U.S. Pat. No. 10,167,457 on Jan. 1, 2019; International Publication No. WO 2017/070633, published Apr. 27, 2017; U.S. Patent Publication No. 2015/0166980, published Jun. 18, 2015; U.S. Pat. No. 9,840,699, issued Dec. 12, 2017; and U.S. Pat. No. 10,077,453, issued Sep. 18, 2018, the contents of each of which are incorporated herein by reference in their entireties.

### Cancer

[0047] The term “cancer” refers to a class of diseases characterized by the development of abnormal cells that proliferate uncontrollably and have the ability to infiltrate and destroy normal body tissues. See e.g., Stedman's Medical Dictionary, 25th ed.; Hensyl ed.; Williams & Wilkins: Philadelphia, 1990. Exemplary cancers include, but are not limited to, acoustic neuroma; adenocarcinoma; adrenal gland cancer; anal cancer; angiosarcoma (e.g., lymphangiosarcoma, lymphangioendotheliosarcoma, hemangiosarcoma); appendix cancer; benign monoclonal gammopathy; biliary cancer (e.g., cholangiocarcinoma); bladder cancer; breast cancer (e.g., adenocarcinoma of the breast, papillary carcinoma of the breast, mammary cancer, medullary carcinoma of the breast); brain cancer (e.g., meningioma, glioblastomas, glioma (e.g., astrocytoma, oligodendroglioma), medulloblastoma); bronchus cancer; carcinoid tumor; cervical cancer (e.g., cervical adenocarcinoma); choriocarcinoma; chordoma; craniopharyngioma; colorectal cancer (e.g., colon cancer, rectal cancer, colorectal adenocarcinoma); connective tissue cancer; epithelial carcinoma; ependymoma; endotheliosarcoma (e.g., Kaposi's sarcoma, multiple idiopathic hemorrhagic sarcoma); endometrial cancer (e.g., uterine cancer, uterine sarcoma); esophageal cancer (e.g., adenocarcinoma of the esophagus, Barrett's adenocarcinoma); Ewing's sarcoma; ocular cancer (e.g., intraocular melanoma, retinoblastoma); familiar hypereosinophilia; gall bladder cancer; gastric cancer (e.g., stomach adenocarcinoma); gastrointestinal stromal tumor (GIST); germ cell cancer; head and neck cancer (e.g., head and neck squamous cell carcinoma, oral cancer (e.g., oral squamous cell carcinoma), throat cancer (e.g., laryngeal cancer, pharyngeal cancer, nasopharyngeal cancer, oropharyngeal cancer)); hematopoietic cancers (e.g., leukemia such as acute lymphocytic leukemia (ALL) (e.g., B-cell ALL, T-cell ALL), acute myelocytic leukemia (AML) (e.g., B-cell AML, T-cell AML), chronic myelocytic leukemia (CML) (e.g., B-cell CML, T-cell CML), and chronic lymphocytic leukemia (CLL) (e.g., B-cell CLL, T-cell CLL)); lymphoma such as Hodgkin lymphoma (HL) (e.g., B-cell HL, T-cell HL) and non-Hodgkin lymphoma (NHL) (e.g., B-cell NHL such as diffuse large cell lymphoma (DLCL) (e.g., diffuse large B-cell lymphoma), follicular lymphoma, chronic lymphocytic leukemia/small lymphocytic lymphoma (CLL/SLL), mantle cell lymphoma (MCL), marginal zone B-cell lymphomas (e.g., mucosa-associated lymphoid tissue (MALT) lymphomas, nodal marginal zone B-cell lymphoma, splenic marginal zone B-cell lymphoma), primary mediastinal B-cell lymphoma, Burkitt lymphoma, lymphoplasmacytic lymphoma (i.e., Waldenström's macroglobulinemia), hairy cell leukemia (HCL), immunoblastic large cell lymphoma, precursor B-lymphoblastic lymphoma and primary central nervous system (CNS) lymphoma; and T-cell NHL such as precursor T-lymphoblastic lymphoma/leukemia, peripheral T-cell lymphoma (PTCL) (e.g., cutaneous T-cell lymphoma (CTCL) (e.g., mycosis fungoides, Sezary syndrome), angioimmunoblastic T-cell lymphoma, extranodal natural killer T-cell lymphoma, enteropathy type T-cell lymphoma, subcutaneous panniculitis-like T-cell lymphoma, and anaplastic large cell lymphoma); a mixture of one or more leukemia/lymphoma as described above; and multiple myeloma (MM)), heavy chain disease (e.g., alpha chain disease, gamma chain disease, mu chain disease); hemangioblastoma; hypopharynx cancer; inflammatory myofibroblastic tumors; immunocytic amyloidosis; kidney cancer (e.g., nephroblastoma a.k.a. Wilms' tumor, renal cell carcinoma); liver cancer (e.g., hepatocellular cancer (HCC), malignant hepatoma); lung cancer (e.g., bronchogenic carcinoma, small cell lung cancer (SCLC), non-small cell lung cancer (NSCLC), adenocarcinoma of the lung); leiomyosarcoma (LMS); mastocytosis (e.g., systemic mastocytosis); muscle cancer; myelodysplastic syndrome (MDS); mesothelioma; myeloproliferative disorder (MPD) (e.g., polycythemia vera (PV), essential thrombocytosis (ET), agnogenic myeloid metaplasia (AMM) a.k.a. myelofibrosis (MF), chronic idiopathic myelofibrosis, chronic myelocytic leukemia (CML), chronic neutrophilic leukemia (CNL), hypereosinophilic syndrome (HES)); neuroblastoma; neurofibroma (e.g., neurofibromatosis (NF) type 1 or type 2, schwannomatosis); neuroendocrine cancer (e.g., gastroenteropancreatic neuroendoctrine tumor (GEP-NET), carcinoid tumor); osteosarcoma (e.g., bone cancer); ovarian cancer (e.g., cystadenocarcinoma, ovarian embryonal carcinoma, ovarian adenocarcinoma); papillary adenocarcinoma; pancreatic cancer (e.g., pancreatic andenocarcinoma, intraductal papillary mucinous neoplasm (IPMN), Islet cell tumors); penile cancer (e.g., Paget's disease of the penis and scrotum); pinealoma; primitive neuroectodermal tumor (PNT); plasma cell neoplasia; paraneoplastic syndromes; intraepithelial neoplasms; prostate cancer (e.g., prostate adenocarcinoma); rectal cancer; rhabdomyosarcoma; salivary gland cancer; skin cancer (e.g., squamous cell carcinoma (SCC), keratoacanthoma (KA), melanoma, basal cell carcinoma (BCC)); small bowel cancer (e.g., appendix cancer); soft tissue sarcoma (e.g., malignant fibrous histiocytoma (MFH), liposarcoma, malignant peripheral nerve sheath tumor (MPNST), chondrosarcoma, fibrosarcoma, myxosarcoma); sebaceous gland carcinoma; small intestine cancer; sweat gland carcinoma; synovioma; testicular cancer (e.g., seminoma, testicular embryonal carcinoma); thyroid cancer (e.g., papillary carcinoma of the thyroid, papillary thyroid carcinoma (PTC), medullary thyroid cancer); urethral cancer; vaginal cancer; and vulvar cancer (e.g., Paget's disease of the vulva).

### Cas9

[0048] The term “Cas9” or “Cas9 nuclease” refers to an RNA-guided nuclease comprising a Cas9 domain, or a fragment thereof (e.g., a protein comprising an active or inactive DNA cleavage domain of Cas9, and/or the gRNA binding domain of Cas9). A “Cas9 domain” as used herein, is a protein fragment comprising an active or inactive cleavage domain of Cas9 and/or the gRNA binding domain of Cas9. A “Cas9 protein” is a full length Cas9 protein. A Cas9 nuclease is also referred to sometimes as a casn1 nuclease or a CRISPR (Clustered Regularly Interspaced Short Palindromic Repeat)-associated nuclease. CRISPR is an adaptive immune system that provides protection against mobile genetic elements (viruses, transposable elements, and conjugative plasmids). CRISPR clusters contain spacers, sequences complementary to antecedent mobile elements, and target invading nucleic acids. CRISPR clusters are transcribed and processed into CRISPR RNA (crRNA). In type II CRISPR systems correct processing of pre-crRNA requires a trans-encoded small RNA (tracrRNA), endogenous ribonuclease 3 (rnc) and a Cas9 domain. The tracrRNA serves as a guide for ribonuclease 3-aided processing of pre-crRNA. Subsequently, Cas9/crRNA/tracrRNA endonucleolytically cleaves a linear or circular dsDNA target complementary to the spacer. The target strand not complementary to crRNA is first cut endonucleolytically, then trimmed 3′-5′ exonucleolytically. In nature, DNA-binding and cleavage typically requires protein and both RNAs. However, single guide RNAs (“sgRNA”, or simply “gRNA”) can be engineered so as to incorporate aspects of both the crRNA and tracrRNA into a single RNA species. See, e.g., Jinek M., Chylinski K., Fonfara I., Hauer M., Doudna J. A., Charpentier E. Science 337:816-821(2012), the entire contents of which are hereby incorporated by reference. Cas9 recognizes a short motif in the CRISPR repeat sequences (the PAM or protospacer adjacent motif) to help distinguish self versus non-self. Cas9 nuclease sequences and structures are well known to those of skill in the art (see, e.g., “Complete genome sequence of an M1 strain of Streptococcus pyogenes.” Ferretti et al., J. J., McShan W. M., Ajdic D. J., Savic D. J., Savic G., Lyon K., Primeaux C., Sezate S., Suvorov A. N., Kenton S., Lai H. S., Lin S. P., Qian Y., Jia H. G., Najar F. Z., Ren Q., Zhu H., Song L., White J., Yuan X., Clifton S. W., Roe B. A., McLaughlin R. E., Proc. Natl. Acad. Sci. U.S.A. 98:4658-4663(2001); “CRISPR RNA maturation by trans-encoded small RNA and host factor RNase III.” Deltcheva E., Chylinski K., Sharma C. M., Gonzales K., Chao Y., Pirzada Z. A., Eckert M. R., Vogel J., Charpentier E., Nature 471:602-607(2011); and “A programmable dual-RNA-guided DNA endonuclease in adaptive bacterial immunity.” Jinek M., Chylinski K., Fonfara I., Hauer M., Doudna J. A., Charpentier E. Science 337:816-821(2012), the entire contents of each of which are incorporated herein by reference). Cas9 orthologs have been described in various species, including, but not limited to, S. pyogenes and S. thermophilus. Additional suitable Cas9 nucleases and sequences will be apparent to those of skill in the art based on this disclosure, and such Cas9 nucleases and sequences include Cas9 sequences from the organisms and loci disclosed in Chylinski, Rhun, and Charpentier, “The tracrRNA and Cas9 families of type II CRISPR-Cas immunity systems” (2013) RNA Biology 10:5, 726-737; the entire contents of which are incorporated herein by reference. In some embodiments, a Cas9 nuclease comprises one or more mutations that partially impair or inactivate the DNA cleavage domain.

[0049] A nuclease-inactivated Cas9 domain may interchangeably be referred to as a “dCas9” protein (for nuclease-“dead” Cas9). Methods for generating a Cas9 domain (or a fragment thereof) having an inactive DNA cleavage domain are known (see, e.g., Jinek et al., Science. 337:816-821(2012); Qi et al., “Repurposing CRISPR as an RNA-Guided Platform for Sequence-Specific Control of Gene Expression” (2013) Cell. 28; 152(5):1173-83, the entire contents of each of which are incorporated herein by reference). For example, the DNA cleavage domain of Cas9 is known to include two subdomains, the HNH nuclease subdomain and the RuvC1 subdomain. The HNH subdomain cleaves the strand complementary to the gRNA, whereas the RuvC1 subdomain cleaves the non-complementary strand. Mutations within these subdomains can silence the nuclease activity of Cas9. For example, the mutations D10A and H840A completely inactivate the nuclease activity of S. pyogenes Cas9 (Jinek et al., Science. 337:816-821(2012); Qi et al., Cell. 28; 152(5):1173-83 (2013)). In some embodiments, proteins comprising fragments of Cas9 are provided. For example, in some embodiments, a protein comprises one of two Cas9 domains: (1) the gRNA binding domain of Cas9; or (2) the DNA cleavage domain of Cas9. In some embodiments, proteins comprising Cas9 or fragments thereof are referred to as “Cas9 variants.” A Cas9 variant shares homology to Cas9, or a fragment thereof. For example, a Cas9 variant is at least about 70% identical, at least about 80% identical, at least about 90% identical, at least about 95% identical, at least about 96% identical, at least about 97% identical, at least about 98% identical, at least about 99% identical, at least about 99.5% identical, at least about 99.8% identical, or at least about 99.9% identical to wild type Cas9 (e.g., SpCas9 of SEQ ID NO: 74). In some embodiments, the Cas9 variant may have 1, 2, 3, 4, 5, 6, 7, 8, 9, 10, 11, 12, 13, 14, 15, 16, 17, 18, 19, 20, 21, 22, 21, 24, 25, 26, 27, 28, 29, 30, 31, 32, 33, 34, 35, 36, 37, 38, 39, 40, 41, 42, 43, 44, 45, 46, 47, 48, 49, 50, or more amino acid changes compared to wild type Cas9 (e.g., SpCas9 of SEQ ID NO: 74). In some embodiments, the Cas9 variant comprises a fragment of Cas9 (e.g., a gRNA binding domain or a DNA-cleavage domain), such that the fragment is at least about 70% identical, at least about 80% identical, at least about 90% identical, at least about 95% identical, at least about 96% identical, at least about 97% identical, at least about 98% identical, at least about 99% identical, at least about 99.5% identical, or at least about 99.9% identical to the corresponding fragment of wild type Cas9 (e.g., SpCas9 of SEQ ID NO: 74). In some embodiments, the fragment is at least 30%, at least 35%, at least 40%, at least 45%, at least 50%, at least 55%, at least 60%, at least 65%, at least 70%, at least 75%, at least 80%, at least 85%, at least 90%, at least 95% identical, at least 96%, at least 97%, at least 98%, at least 99%, or at least 99.5% of the amino acid length of a corresponding wild type Cas9 (e.g., SpCas9 of SEQ ID NO: 74).

[0050] As used herein, the term “nCas9” or “Cas9 nickase” refers to a Cas9 or a variant thereof, which cleaves or nicks only one of the strands of a target cut site thereby introducing a nick in a double strand DNA molecule rather than creating a double strand break. This can be achieved by introducing appropriate mutations in a wild-type Cas9 which inactivates one of the two endonuclease activities of the Cas9. Any suitable mutation which inactivates one Cas9 endonuclease activity but leaves the other intact is contemplated, such as one of D10A or H840A mutations in the wild-type S. pyogenes Cas9 amino acid sequence, or a D10A mutation in the wild-type S. aureus Cas9 amino acid sequence, may be used to form the nCas9.

cDNA

[0051] The term “cDNA” refers to a strand of DNA copied from an RNA template. cDNA is complementary to the RNA template.

### Circular Permutant

[0052] As used herein, the term “circular permutant” refers to a protein or polypeptide (e.g., a Cas9) comprising a circular permutation, which is change in the protein's structural configuration involving a change in order of amino acids appearing in the protein's amino acid sequence. In other words, circular permutants are proteins that have altered N- and C-termini as compared to a wild-type counterpart, e.g., the wild-type C-terminal half of a protein becomes the new N-terminal half. Circular permutation (or CP) is essentially the topological rearrangement of a protein's primary sequence, connecting its N- and C-terminus, often with a peptide linker, while concurrently splitting its sequence at a different position to create new, adjacent N- and C-termini. The result is a protein structure with different connectivity, but which often can have the same overall similar three-dimensional (3D) shape, and possibly include improved or altered characteristics, including, reduced proteolytic susceptibility, improved catalytic activity, altered substrate or ligand binding, and/or improved thermostability. Circular permutant proteins can occur in nature (e.g., concanavalin A and lectin). In addition, circular permutation can occur as a result of posttranslational modifications or may be engineered using recombinant techniques (e.g., see, Oakes et al., “Protein Engineering of Cas9 for enhanced function,” Methods Enzymol, 2014, 546: 491-511 and Oakes et al., “CRISPR-Cas9 Circular Permutants as Programmable Scaffolds for Genome Modification,” Cell, Jan. 10, 2019, 176: 254-267, each of are incorporated herein by reference).

Circularly Permuted napDNAbp

[0053] The term “circularly permuted napDNAbp” refers to any napDNAbp protein, or variant thereof (e.g., SpCas9), that occurs as or engineered as a circular permutant, whereby its N- and C-termini have been topically rearranged. Such circularly permuted proteins (“CP-napDNAbp”, such as “CP-Cas9” in the case of Cas9), or variants thereof, retain the ability to bind DNA when complexed with a guide RNA (gRNA). See, Oakes et al., “Protein Engineering of Cas9 for enhanced function,” Methods Enzymol, 2014, 546: 491-511 and Oakes et al., “CRISPR-Cas9 Circular Permutants as Programmable Scaffolds for Genome Modification,” Cell, Jan. 10, 2019, 176: 254-267, each of are incorporated herein by reference. The instant disclosure contemplates any previously known CP-Cas9 or use a new CP-Cas9 so long as the resulting circularly permuted protein retains the ability to bind DNA when complexed with a guide RNA (gRNA). Exemplary CP-Cas9 proteins are SEQ ID NOs: 282-286.

### Cytidine Deaminase (or Cytosine Deaminase)

[0054] As used herein, the term “cytidine deaminase” or “cytidine deaminase domain” refers to a protein or enzyme that catalyzes a deamination reaction of a cytidine or cytosine. The terms “cytidine deaminase” and “cytosine deaminase” are used interchangeably for purposes of the present disclosure. For example, for purposes of the disclosure, reference to an “cytidine base editor” (CBE) can refer to the same entity as an “cytosine base editor” (CBE). Similarly, for purposes of the disclosure, reference to an “cytidine deaminase” can refer to the same entity as an “cytosine deaminase.” However, the person having ordinary skill in the art will appreciate that “cytosine” refers to the pyrimidine base whereas “cytidine” refers to the larger nucleoside molecule that includes the pyrimidine base (cytosine) and sugar moiety (e.g., either ribose or deoxyribose). A cytidine deaminase is encoded by the CDA gene and is an enzyme that catalyzes the removal of an amine group from cytidine (i.e., the base cytosine when attached to a ribose ring, i.e., the nucleoside referred to as cytidine) to uridine (C to U) and deoxycytidine to deoxyuridine (C to U). A non-limiting example of a cytidine deaminase is APOBEC1 (“apolipoprotein B mRNA editing enzyme, catalytic polypeptide 1”). Another example is AID (“activation-induced cytidine deaminase”). Under standard Watson-Crick hydrogen bond pairing, a cytosine base hydrogen bonds to a guanine base. When cytidine is converted to uridine (or deoxycytidine is converted to deoxyuridine), the uridine (or the uracil base of uridine) undergoes hydrogen bond pairing with the base adenine. Thus, a conversion of “C” to uridine (“U”) by cytidine deaminase will cause the insertion of “A” instead of a “G” during cellular repair and/or replication processes. Since the adenine “A” pairs with thymine “T”, the cytidine deaminase in coordination with DNA replication causes the conversion of an CG pairing to a TA pairing in the double-stranded DNA molecule.

### CRISPR

[0055] CRISPR is a family of DNA sequences (i.e., CRISPR clusters) in bacteria and archaea that represent snippets of prior infections by a virus that have invaded the prokaryote. The snippets of DNA are used by the prokaryotic cell to detect and destroy DNA from subsequent attacks by similar viruses and effectively compose, along with an array of CRISPR-associated proteins (including Cas9 and homologs thereof) and CRISPR-associated RNA, a prokaryotic immune defense system. In nature, CRISPR clusters are transcribed and processed into CRISPR RNA (crRNA). In certain types of CRISPR systems (e.g., type II CRISPR systems), correct processing of pre-crRNA requires a trans-encoded small RNA (tracrRNA), endogenous ribonuclease 3 (rnc) and a Cas9 protein. The tracrRNA serves as a guide for ribonuclease 3-aided processing of pre-crRNA. Subsequently, Cas9/crRNA/tracrRNA endonucleolytically cleaves linear or circular dsDNA target complementary to the RNA. Specifically, the target strand not complementary to crRNA is first cut endonucleolytically, then trimmed 3′-5′ exonucleolytically. In nature, DNA-binding and cleavage typically requires protein and both RNAs. However, single guide RNAs (“sgRNA”, or simply “gRNA”) can be engineered so as to incorporate aspects of both the crRNA and tracrRNA into a single RNA species—the guide RNA. See, e.g., Jinek M., Chylinski K., Fonfara I., Hauer M., Doudna J. A., Charpentier E. Science 337:816-821(2012), the entire contents of which is hereby incorporated by reference. Cas9 recognizes a short motif in the CRISPR repeat sequences (the PAM or protospacer adjacent motif) to help distinguish self versus non-self. CRISPR biology, as well as Cas9 nuclease sequences and structures are well known to those of skill in the art (see, e.g., “Complete genome sequence of an M1 strain of Streptococcus pyogenes.” Ferretti et al., J. J., McShan W. M., Ajdic D. J., Savic D. J., Savic G., Lyon K., Primeaux C., Sezate S., Suvorov A. N., Kenton S., Lai H. S., Lin S. P., Qian Y., Jia H. G., Najar F. Z., Ren Q., Zhu H., Song L., White J., Yuan X., Clifton S. W., Roe B. A., McLaughlin R. E., Proc. Natl. Acad. Sci. U.S.A. 98:4658-4663(2001); “CRISPR RNA maturation by trans-encoded small RNA and host factor RNase III.” Deltcheva E., Chylinski K., Sharma C. M., Gonzales K., Chao Y., Pirzada Z. A., Eckert M. R., Vogel J., Charpentier E., Nature 471:602-607(2011); and “A programmable dual-RNA-guided DNA endonuclease in adaptive bacterial immunity.” Jinek M., Chylinski K., Fonfara I., Hauer M., Doudna J. A., Charpentier E. Science 337:816-821(2012), the entire contents of each of which are incorporated herein by reference). Cas9 orthologs have been described in various species, including, but not limited to, S. pyogenes and S. thermophilus. Additional suitable Cas9 nucleases and sequences will be apparent to those of skill in the art based on this disclosure, and such Cas9 nucleases and sequences include Cas9 sequences from the organisms and loci disclosed in Chylinski, Rhun, and Charpentier, “The tracrRNA and Cas9 families of type II CRISPR-Cas immunity systems” (2013) RNA Biology 10:5, 726-737; the entire contents of which are incorporated herein by reference.

[0056] In certain types of CRISPR systems (e.g., type II CRISPR systems), correct processing of pre-crRNA requires a trans-encoded small RNA (tracrRNA), endogenous ribonuclease 3 (rnc), and a Cas9 protein. The tracrRNA serves as a guide for ribonuclease 3-aided processing of pre-crRNA. Subsequently, Cas9/crRNA/tracrRNA endonucleolytically cleaves a linear or circular nucleic acid target complementary to the RNA. Specifically, the target strand not complementary to crRNA is first cut endonucleolytically, then trimmed 3′-5′ exonucleolytically. In nature, DNA-binding and cleavage typically requires protein and both RNAs. However, single guide RNAs (“sgRNA”, or simply “gRNA”) can be engineered to incorporate embodiments of both the crRNA and tracrRNA into a single RNA species—the guide RNA.

[0057] In general, a “CRISPR system” refers collectively to transcripts and other elements involved in the expression of or directing the activity of CRISPR-associated (“Cas”) genes, including sequences encoding a Cas gene, a tracr (trans-activating CRISPR) sequence (e.g. tracrRNA or an active partial tracrRNA), a tracr mate sequence (encompassing a “direct repeat” and a tracrRNA-processed partial direct repeat in the context of an endogenous CRISPR system), a guide sequence (also referred to as a “spacer” in the context of an endogenous CRISPR system), or other sequences and transcripts from a CRISPR locus. The tracrRNA of the system is complementary (fully or partially) to the tracr mate sequence present on the guide RNA.

### Deaminase

[0058] The term “deaminase” or “deaminase domain” refers to a protein or enzyme that catalyzes a deamination reaction. In some embodiments, the deaminase is an adenosine (or adenine) deaminase, which catalyzes the hydrolytic deamination of adenine or adenosine. In some embodiments, the adenosine deaminase catalyzes the hydrolytic deamination of adenine or adenosine in deoxyribonucleic acid (DNA) to inosine. In other embodiments, the deaminase is a cytidine (or cytosine) deaminase, which catalyzes the hydrolytic deamination of cytidine or cytosine.

[0059] The deaminases provided herein may be from any organism, such as a bacterium. In some embodiments, the deaminase or deaminase domain is a variant of a naturally-occurring deaminase from an organism. In some embodiments, the deaminase or deaminase domain does not occur in nature. For example, in some embodiments, the deaminase or deaminase domain is at least 50%, at least 55%, at least 60%, at least 65%, at least 70%, at least 75% at least 80%, at least 85%, at least 90%, at least 95%, at least 96%, at least 97%, at least 98%, at least 99%, or at least 99.5% identical to a naturally-occurring deaminase.

### DNA Binding Protein

[0060] As used herein, the term “DNA binding protein” or “DNA binding protein domain” refers to any protein that localizes to and binds a specific target DNA nucleotide sequence (e.g. a gene locus of a genome). This term embraces RNA-programmable proteins, which associate (e.g. form a complex) with one or more nucleic acid molecules (i.e., which includes, for example, guide RNA in the case of Cas systems) that direct or otherwise program the protein to localize to a specific target nucleotide sequence (e.g., DNA sequence) that is complementary to the one or more nucleic acid molecules (or a portion or region thereof) associated with the protein. Exemplary RNA-programmable proteins are CRISPR-Cas9 proteins, as well as Cas9 equivalents, homologs, orthologs, or paralogs, whether naturally occurring or non-naturally occurring (e.g. engineered or modified), and may include a Cas9 equivalent from any type of CRISPR system (e.g. type II, V, VI), including Cpf1 (a type-V CRISPR-Cas systems), C2c1 (a type V CRISPR-Cas system), C2c2 (a type VI CRISPR-Cas system), C2c3 (a type V CRISPR-Cas system), dCas9, GeoCas9, CjCas9, Cas12a, Cas12b, Cas12c, Cas12d, Cas12g, Cas12h, Cas12i, Cas13d, Cas14, Argonaute, and nCas9. Further Cas-equivalents are described in Makarova et al., “C2c2 is a single-component programmable RNA-guided RNA-targeting CRISPR effector,” Science 2016; 353(6299), the contents of which are incorporated herein by reference.

### DNA Editing Efficiency

[0061] The term “DNA editing efficiency,” as used herein, refers to the number or proportion of intended base pairs that are edited. For example, if a base editor edits 10% of the base pairs that it is intended to target (e.g., within a cell or within a population of cells), then the base editor can be described as being 10% efficient. Some aspects of editing efficiency embrace the modification (e.g. deamination) of a specific nucleotide within DNA, without generating a large number or percentage of insertions or deletions (i.e., indels). It is generally accepted that editing while generating less than 5% indels (as measured over total target nucleotide substrates) is high editing efficiency. The generation of more than 20% indels is generally accepted as poor or low editing efficiency. Indel formation may be measured by techniques known in the art, including high-throughput screening of sequencing reads.

### Downstream

[0062] As used herein, the terms “upstream” and “downstream” are terms of relativity that define the linear position of at least two elements located in a nucleic acid molecule (whether single or double-stranded) that is orientated in a 5′-to-3′ direction. In particular, a first element is upstream of a second element in a nucleic acid molecule where the first element is positioned somewhere that is 5′ to the second element. For example, a SNP is upstream of a Cas9-induced nick site if the SNP is on the 5′ side of the nick site. Conversely, a first element is downstream of a second element in a nucleic acid molecule where the first element is positioned somewhere that is 3′ to the second element. For example, a SNP is downstream of a Cas9-induced nick site if the SNP is on the 3′ side of the nick site. The nucleic acid molecule can be a DNA (double or single stranded). RNA (double or single stranded), or a hybrid of DNA and RNA. The analysis is the same for single strand nucleic acid molecule and a double strand molecule since the terms upstream and downstream are in reference to only a single strand of a nucleic acid molecule, except that one needs to select which strand of the double stranded molecule is being considered. Often, the strand of a double stranded DNA which can be used to determine the positional relativity of at least two elements is the “sense” or “coding” strand. In genetics, a “sense” strand is the segment within double-stranded DNA that runs from 5′ to 3′, and which is complementary to the antisense strand of DNA, or template strand, which runs from 3′ to 5′. Thus, as an example, a SNP nucleobase is “downstream” of a promoter sequence in a genomic DNA (which is double-stranded) if the SNP nucleobase is on the 3′ side of the promoter on the sense or coding strand.

### Effective Amount

[0063] The term “effective amount,” as used herein, refers to an amount of a biologically active agent that is sufficient to elicit a desired biological response. For example, in some embodiments, an effective amount of a base editor may refer to the amount of the editor that is sufficient to edit a target site nucleotide sequence, e.g., a genome. In some embodiments, an effective amount of a base editor provided herein, e.g., of a fusion protein comprising a nickase Cas9 domain and a guide RNA may refer to the amount of the fusion protein that is sufficient to induce editing of a target site specifically bound and edited by the fusion protein. As will be appreciated by the skilled artisan, the effective amount of an agent, e.g., a fusion protein, a nuclease, a hybrid protein, a protein dimer, a complex of a protein (or protein dimer) and a polynucleotide, or a polynucleotide, may vary depending on various factors as, for example, on the desired biological response, e.g., on the specific allele, genome, or target site to be edited, on the cell or tissue being targeted, and on the agent being used.

### Functional Equivalent

[0064] The term “functional equivalent” refers to a second biomolecule that is equivalent in function, but not necessarily equivalent in structure to a first biomolecule. For example, a “Cas9 equivalent” refers to a protein that has the same or substantially the same functions as Cas9, but not necessarily the same amino acid sequence. In the context of the disclosure, the specification refers throughout to “a protein X, or a functional equivalent thereof.” In this context, a “functional equivalent” of protein X embraces any homolog, paralog, fragment, naturally occurring, engineered, circular permutant, mutated, or synthetic version of protein X which bears an equivalent function.

### Fusion Protein

[0065] The term “fusion protein” as used herein refers to a hybrid polypeptide which comprises protein domains from at least two different proteins. One protein may be located at the amino-terminal (N-terminal) portion of the fusion protein or at the carboxy-terminal (C-terminal) protein thus forming an “amino-terminal fusion protein” or a “carboxy-terminal fusion protein,” respectively. A protein may comprise different domains, for example, a nucleic acid binding domain (e.g., the gRNA binding domain of Cas9 that directs the binding of the protein to a target site) and a nucleic acid cleavage domain or a catalytic domain of a nucleic-acid editing protein. Another example includes a Cas9 or equivalent thereof fused to an adenosine deaminase. Any of the proteins provided herein may be produced by any method known in the art. For example, the proteins provided herein may be produced via recombinant protein expression and purification, which is especially suited for fusion proteins comprising a peptide linker. Methods for recombinant protein expression and purification are well known, and include those described by Green and Sambrook, Molecular Cloning: A Laboratory Manual (4^{th} ed., Cold Spring Harbor Laboratory Press, Cold Spring Harbor, N.Y. (2012)), the entire contents of which are incorporated herein by reference.

### Guide Nucleic Acid

[0066] The term “guide nucleic acid” or “napDNAbp-programming nucleic acid molecule” or equivalently “guide sequence” refers the one or more nucleic acid molecules which associate with and direct or otherwise program a napDNAbp protein to localize to a specific target nucleotide sequence (e.g., a gene locus of a genome) that is complementary to the one or more nucleic acid molecules (or a portion or region thereof) associated with the protein, thereby causing the napDNAbp protein to bind to the nucleotide sequence at the specific target site. A non-limiting example is a guide RNA of a Cas protein of a CRISPR-Cas genome editing system. Chemically, guide nucleic acids can be all RNA, all DNA, or a chimeric of RNA and DNA. The guide nucleic acids may also include nucleotide analogs. Guide nucleic acids can be expressed as transcription products or can be synthesized.

[0067] Guide RNA is a particular type of guide nucleic acid which is mostly commonly associated with a Cas protein of a CRISPR-Cas9 and which associates with Cas9, directing the Cas9 protein to a specific sequence in a DNA molecule that includes complementarity to protospacer sequence of the guide RNA.

Guide RNA (“gRNA”)

[0068] As used herein, a “guide RNA” refers to a synthetic fusion of the endogenous bacterial crRNA and tracrRNA that provides both targeting specificity and scaffolding and/or binding ability for Cas9 nuclease to a target DNA. This synthetic fusion does not exist in nature and is also commonly referred to as an sgRNA. However, the term, guide RNA, also embraces equivalent guide nucleic acid molecules that associate with Cas9 equivalents, homologs, orthologs, or paralogs, whether naturally occurring or non-naturally occurring (e.g., engineered or recombinant), and which otherwise program the Cas9 equivalent to localize to a specific target nucleotide sequence. The Cas9 equivalents may include other napDNAbp from any type of CRISPR system (e.g., type II, V, VI), including Cpf1 (a type-V CRISPR-Cas systems), C2c1 (a type V CRISPR-Cas system), C2c2 (a type VI CRISPR-Cas system) and C2c3 (a type V CRISPR-Cas system). Further Cas-equivalents are described in Makarova et al., “C2c2 is a single-component programmable RNA-guided RNA-targeting CRISPR effector,” Science 2016; 353(6299), the contents of which are incorporated herein by reference. Exemplary sequences are and structures of guide RNAs are provided herein. In addition, methods for designing appropriate guide RNA sequences are provided herein.

[0069] As used herein, the term “guide RNA” is a particular type of guide nucleic acid which is most commonly associated with a Cas protein of a CRISPR-Cas9 and which associates with Cas9, directing the Cas9 protein to a specific sequence in a DNA molecule that includes complementarity to the protospacer sequence of the guide RNA. However, this term also embraces the equivalent guide nucleic acid molecules that associate with Cas9 equivalents, homologs, orthologs, or paralogs, whether naturally occurring or non-naturally occurring (e.g., engineered or recombinant), and which otherwise program the Cas9 equivalent to localize to a specific target nucleotide sequence. The Cas9 equivalents may include other napDNAbp from any type of CRISPR system (e.g., type II, V, VI), including Cpf1 (a type-V CRISPR-Cas systems), C2c1 (a type V CRISPR-Cas system), C2c2 (a type VI CRISPR-Cas system), and C2c3 (a type V CRISPR-Cas system). Further Cas-equivalents are described in Makarova et al., “C2c2 is a single-component programmable RNA-guided RNA-targeting CRISPR effector,” Science 2016; 353(6299), the contents of which are incorporated herein by reference. Exemplary sequences and structures of guide RNAs are provided herein. Guide RNAs may comprise various structural elements that include, but are not limited to (a) a spacer sequence—the sequence in the guide RNA (having ˜20 nts in length) which binds to a complementary strand of the target DNA (and has the same sequence as the protospacer of the target DNA) and (b) a gRNA core (or gRNA scaffold or backbone sequence)—refers to the sequence within the gRNA that is responsible for Cas9 binding, it does not include the ˜20 bp spacer sequence that is used to guide Cas9 to target DNA.

### Guide RNA Target Sequence

[0070] As used herein, the “guide RNA target sequence” refers to the ˜20 nucleotides that are complementary to the protospacer sequence in the PAM strand. The target sequence is the sequence that anneals to or is targeted by the spacer sequence of the guide RNA. The spacer sequence of the guide RNA and the protospacer have the same or substantially the sequence (except the spacer sequence is RNA and the protospacer is DNA).

### Guide RNA Scaffold Sequence

[0071] As used herein, the “guide RNA scaffold sequence” refers to the sequence within the gRNA that is responsible for Cas9 binding, it does not include the 20 bp spacer/targeting sequence that is used to guide Cas9 to target DNA.

### Host Cell

[0072] The term “host cell,” as used herein, refers to a cell that can host, replicate, and transfer a phage vector useful for a continuous evolution process as provided herein. In embodiments where the vector is a viral vector, a suitable host cell is a cell that may be infected by the viral vector, can replicate it, and can package it into viral particles that can infect fresh host cells. A cell can host a viral vector if it supports expression of genes of viral vector, replication of the viral genome, and/or the generation of viral particles. One criterion to determine whether a cell is a suitable host cell for a given viral vector is to determine whether the cell can support the viral life cycle of a wild-type viral genome that the viral vector is derived from. For example, if the viral vector is a modified M13 phage genome, as provided in some embodiments described herein, then a suitable host cell would be any cell that can support the wild-type M13 phage life cycle. Suitable host cells for viral vectors useful in continuous evolution processes are well known to those of skill in the art, and the disclosure is not limited in this respect. In some embodiments, the viral vector is a phage and the host cell is a bacterial cell. In some embodiments, the host cell is an E. coli cell. Suitable E. coli host strains will be apparent to those of skill in the art, and include, but are not limited to, New England Biolabs (NEB) Turbo, Top10F′, DH12S, ER2738, ER2267, and XL1-Blue MRF′. These strain names are art recognized and the genotype of these strains has been well characterized. It should be understood that the above strains are exemplary only and that the invention is not limited in this respect. The term “fresh,” as used herein interchangeably with the terms “non-infected” or “uninfected” in the context of host cells, refers to a host cell that has not been infected by a viral vector comprising a gene of interest as used in a continuous evolution process provided herein. A fresh host cell can, however, have been infected by a viral vector unrelated to the vector to be evolved or by a vector of the same or a similar type but not carrying the gene of interest.

[0073] In some embodiments, the host cell is a prokaryotic cell, for example, a bacterial cell. In some embodiments, the host cell is an E. coli cell. In some embodiments, the host cell is a eukaryotic cell, for example, a yeast cell, an insect cell, or a mammalian cell. The type of host cell, will, of course, depend on the viral vector employed, and suitable host cell/viral vector combinations will be readily apparent to those of skill in the art.

### Inteins and Split-Inteins

[0074] As used herein, the term “intein” refers to auto-processing polypeptide domains found in organisms from all domains of life. An intein (intervening protein) carries out a unique auto-processing event known as protein splicing in which it excises itself out from a larger precursor polypeptide through the cleavage of two peptide bonds and, in the process, ligates the flanking extein (external protein) sequences through the formation of a new peptide bond. This rearrangement occurs post-translationally (or possibly co-translationally), as intein genes are found embedded in frame within other protein-coding genes. Furthermore, intein-mediated protein splicing is spontaneous; it requires no external factor or energy source, only the folding of the intein domain. This process is also known as cis-protein splicing, as opposed to the natural process of trans-protein splicing with “split inteins.”

[0075] Split inteins are a sub-category of inteins. Unlike the more common contiguous inteins, split inteins are transcribed and translated as two separate polypeptides, the N-intein and C-intein, each fused to one extein. Upon translation, the intein fragments spontaneously and non-covalently assemble into the canonical intein structure to carry out protein splicing in trans.

[0076] Inteins and split inteins are the protein equivalent of the self-splicing RNA introns (see Perler et al., Nucleic Acids Res. 22:1125-1127 (1994)), which catalyze their own excision from a precursor protein with the concomitant fusion of the flanking protein sequences, known as exteins (reviewed in Perler et al., Curr. Opin. Chem. Biol. 1:292-299 (1997); Perler, F. B. Cell 92(1):1-4 (1998); Xu et al., EMBO J. 15(19):5146-5153 (1996)).

[0077] As used herein, the term “protein splicing” refers to a process in which an interior region of a precursor protein (an intein) is excised and the flanking regions of the protein (exteins) are ligated to form the mature protein. This natural process has been observed in numerous proteins from both prokaryotes and eukaryotes (Perler, F. B., Xu, M. Q., Paulus, H. Current Opinion in Chemical Biology 1997, 1, 292-299; Perler, F. B. Nucleic Acids Research 1999, 27, 346-347). The intein unit contains the necessary components needed to catalyze protein splicing and often contains an endonuclease domain that participates in intein mobility (Perler, F. B., Davis, E. O., Dean, G. E., Gimble, F. S., Jack, W. E., Neff, N., Noren, C. J., Thomer, J., Belfort, M. Nucleic Acids Research 1994, 22, 1127-1127). The resulting proteins are linked, however, not expressed as separate proteins. Protein splicing may also be conducted in trans with split inteins expressed on separate polypeptides spontaneously combine to form a single intein which then undergoes the protein splicing process to join to separate proteins.

[0078] The elucidation of the mechanism of protein splicing has led to a number of intein-based applications (Comb, et al., U.S. Pat. No. 5,496,714; Comb, et al., U.S. Pat. No. 5,834,247; Camarero and Muir, J. Amer. Chem. Soc., 121:5597-5598 (1999); Chong, et al., Gene, 192:271-281 (1997), Chong, et al., Nucleic Acids Res., 26:5109-5115 (1998); Chong, et al., J. Biol. Chem., 273:10567-10577 (1998); Cotton, et al. J. Am. Chem. Soc., 121:1100-1101 (1999); Evans, et al., J. Biol. Chem., 274:18359-18363 (1999); Evans, et al., J. Biol. Chem., 274:3923-3926 (1999); Evans, et al., Protein Sci., 7:2256-2264 (1998); Evans, et al., J. Biol. Chem., 275:9091-9094 (2000); Iwai and Pluckthun, FEBS Lett. 459:166-172 (1999); Mathys, et al., Gene, 231:1-13 (1999); Mills, et al., Proc. Natl. Acad. Sci. USA 95:3543-3548 (1998); Muir, et al., Proc. Natl. Acad. Sci. USA 95:6705-6710 (1998); Otomo, et al., Biochemistry 38:16040-16044 (1999); Otomo, et al., J. Biolmol. NMR 14:105-114 (1999); Scott, et al., Proc. Natl. Acad. Sci. USA 96:13638-13643 (1999); Severinov and Muir, J. Biol. Chem., 273:16205-16209 (1998); Shingledecker, et al., Gene, 207:187-195 (1998); Southworth, et al., EMBO J. 17:918-926 (1998); Southworth, et al., Biotechniques, 27:110-120 (1999); Wood, et al., Nat. Biotechnol., 17:889-892 (1999); Wu, et al., Proc. Natl. Acad. Sci. USA 95:9226-9231 (1998a); Wu, et al., Biochim Biophys Acta 1387:422-432 (1998b); Xu, et al., Proc. Natl. Acad. Sci. USA 96:388-393 (1999); Yamazaki, et al., J. Am. Chem. Soc., 120:5591-5592 (1998)). Each reference is incorporated herein by reference.

### Ligand-Dependent Intein

[0079] The term “ligand-dependent intein,” as used herein refers to an intein that comprises a ligand-binding domain. Typically, the ligand-binding domain is inserted into the amino acid sequence of the intein, resulting in a structure intein (N)—ligand-binding domain—intein (C). Typically, ligand-dependent inteins exhibit no or only minimal protein splicing activity in the absence of an appropriate ligand, and a marked increase of protein splicing activity in the presence of the ligand. In some embodiments, the ligand-dependent intein does not exhibit observable splicing activity in the absence of ligand but does exhibit splicing activity in the presence of the ligand. In some embodiments, the ligand-dependent intein exhibits an observable protein splicing activity in the absence of the ligand, and a protein splicing activity in the presence of an appropriate ligand that is at least 5 times, at least 10 times, at least 50 times, at least 100 times, at least 150 times, at least 200 times, at least 250 times, at least 500 times, at least 1000 times, at least 1500 times, at least 2000 times, at least 2500 times, at least 5000 times, at least 10000 times, at least 20000 times, at least 25000 times, at least 50000 times, at least 100000 times, at least 500000 times, or at least 1000000 times greater than the activity observed in the absence of the ligand. In some embodiments, the increase in activity is dose dependent over at least 1 order of magnitude, at least 2 orders of magnitude, at least 3 orders of magnitude, at least 4 orders of magnitude, or at least 5 orders of magnitude, allowing for fine-tuning of intein activity by adjusting the concentration of the ligand. Suitable ligand-dependent inteins are known in the art, and in include those provided below and those described in published U.S. Patent Application U.S. 2014/0065711 A1; Mootz et al., “Protein splicing triggered by a small molecule.” J. Am. Chem. Soc. 2002; 124, 9044-9045; Mootz et al., “Conditional protein splicing: a new tool to control protein structure and function in vitro and in vivo.” J. Am. Chem. Soc. 2003; 125, 10561-10569; Buskirk et al., Proc. Natl. Acad. Sci. USA. 2004; 101, 10505-10510); Skretas & Wood, “Regulation of protein activity with small-molecule-controlled inteins.” Protein Sci. 2005; 14, 523-532; Schwartz, et al., “Post-translational enzyme activation in an animal via optimized conditional protein splicing.” Nat. Chem. Biol. 2007; 3, 50-54; Peck et al., Chem. Biol. 2011; 18 (5), 619-630; the entire contents of each are hereby incorporated by reference. Exemplary sequences are as follows:

| NAME | SEQUENCE OF LIGAND-DEPENDENT INTEIN |
|---|---|
| 2-4 INTEIN: | CLAEGTRIFDPVTGTTHRIEDVVDGRKPIHVVAAAKDGTLLARPVVSWFDQGTRDVIGLRIAGGAIV |
| | WATPDHKVLTEYGWRAAGELRKGDRVAGPGGSGNSLALSLTADQMVSALLDAEPPILYSEYDPTSPF |
| | SEASMMGLLTNLADRELVHMINWAKRVPGFVDLTLHDQAHLLECAWLEILMIGLVWRSMEHPGKLLF |
| | APNLLLDRNQGKCVEGMVEIFDMLLATSSRFRMMNLQGEEFVCLKSIILLNSGVYTFLSSTLKSLEE |
| | KDHIHRALDKITDTLIHLMAKAGLTLQQQHQRLAQLLLILSHIRHMSNKGMEHLYSMKYKNVVPLYD |
| | LLLEMLDAHRLHAGGSGASRVQAFADALDDKFLHDMLAEELRYSVIREVLPTRRARTFDLEVEELHT |
| | LVAEGVVVHNC (SEQ ID NO: 23) |
| 3-2 INTEIN | CLAEGTRIFDPVTGTTHRIEDVVDGRKPIHVVAVAKDGTLLARPVVSWFDQGTRDVIGLRIAGGAIV |
| | WATPDHKVLTEYGWRAAGELRKGDRVAGPGGSGNSLALSLTADQMVSALLDAEPPILYSEYDPTSPF |
| | SEASMMGLLTNLADRELVHMINWAKRVPGFVDLTLHDQAHLLECAWLEILMIGLVWRSMEHPGKLLF |
| | APNLLLDRNQGKCVEGMVEIFDMLLATSSRFRMMNLQGEEFVCLKSIILLNSGVYTFLSSTLKSLEE |
| | KDHIHRALDKITDTLIHLMAKAGLTLQQQHQRLAQLLLILSHIRHMSNKGMEHLYSMKYTNVVPLYD |
| | LLLEMLDAHRLHAGGSGASRVQAFADALDDKFLHDMLAEELRYSVIREVLPTRRARTFDLEVEELHT |
| | LVAEGVVVHNC (SEQ ID NO: 24) |
| 30R3-1 INTEIN | CLAEGTRIFDPVTGTTHRIEDVVDGRKPIHVVAAAKDGTLLARPVVSWFDQGTRDVIGLRIAGGATV |
| | WATPDHKVLTEYGWRAAGELRKGDRVAGPGGSGNSLALSLTADQMVSALLDAEPPIPYSEYDPTSPF |
| | SEASMMGLLTNLADRELVHMINWAKRVPGFVDLTLHDQAHLLECAWLEILMIGLVWRSMEHPGKLLF |
| | APNLLLDRNQGKCVEGMVEIFDMLLATSSRFRMMNLQGEEFVCLKSIILLNSGVYTFLSSTLKSLEE |
| | KDHIHRALDKITDTLIHLMAKAGLTLQQQHQRLAQLLLILSHIRHMSNKGMEHLYSMKYKNVVPLYD |
| | LLLEMLDAHRLHAGGSGASRVQAFADALDDKFLHDMLAEGLRYSVIREVLPTRRARTFDLEVEELHT |
| | LVAEGVVVHNC (SEQ ID NO: 25) |
| 30R3-2 INTEIN | CLAEGTRIFDPVTGTTHRIEDVVDGRKPIHVVAAAKDGTLLARPVVSWFDQGTRDVIGLRIAGGATV |
| | WATPDHKVLTEYGWRAAGELRKGDRVAGPGGSGNSLALSLTADQMVSALLDAEPPILYSEYDPTSPF |
| | SEASMMGLLTNLADRELVHMINWAKRVPGFVDLTLHDQAHLLECAWLEILMIGLVWRSMEHPGKLLF |
| | APNLLLDRNQGKCVEGMVEIFDMLLATSSRFRMMNLQGEEFVCLKSIILLNSGVYTFLSSTLKSLEE |
| | KDHIHRALDKITDTLIHLMAKAGLTLQQQHQRLAQLLLILSHIRHMSNKGMEHLYSMKYKNVVPLYD |
| | LLLEMLDAHRLHAGGSGASRVQAFADALDDKFLHDMLAEELRYSVIREVLPTRRARTFDLEVEELHT |
| | LVAEGVVVHNC (SEQ ID NO: 26) |
| 30R3-3 INTEIN | CLAEGTRIFDPVTGTTHRIEDVVDGRKPIHVVAAAKDGTLLARPVVSWFDQGTRDVIGLRIAGGATV |
| | WATPDHKVLTEYGWRAAGELRKGDRVAGPGGSGNSLALSLTADQMVSALLDAEPPIPYSEYDPTSPF |
| | SEASMMGLLTNLADRELVHMINWAKRVPGFVDLTLHDQAHLLECAWLEILMIGLVWRSMEHPGKLLF |
| | APNLLLDRNQGKCVEGMVEIFDMLLATSSRFRMMNLQGEEFVCLKSIILLNSGVYTFLSSTLKSLEE |
| | KDHIHRALDKITDTLIHLMAKAGLTLQQQHQRLAQLLLILSHIRHMSNKGMEHLYSMKYKNVVPLYD |
| | LLLEMLDAHRLHAGGSGASRVQAFADALDDKFLHDMLAEELRYSVIREVLPTRRARTFDLEVEELHT |
| | LVAEGVVVHNC (SEQ ID NO: 27) |
| 37R3-1 INTEIN | CLAEGTRIFDPVTGTTHRIEDVVDGRKPIHVVAAAKDGTLLARPVVSWFDQGTRDVIGLRIAGGATV |
| | WATPDHKVLTEYGWRAAGELRKGDRVAGPGGSGNSLALSLTADQMVSALLDAEPPILYSEYNPTSPF |
| | SEASMMGLLTNLADRELVHMINWAKRVPGFVDLTLHDQAHLLERAWLEILMIGLVWRSMEHPGKLLF |
| | APNLLLDRNQGKCVEGMVEIFDMLLATSSRFRMMNLQGEEFVCLKSIILLNSGVYTFLSSTLKSLEE |
| | KDHIHRALDKITDTLIHLMAKAGLTLQQQHQRLAQLLLILSHIRHMSNKGMEHLYSMKYKNVVPLYD |
| | LLLEMLDAHRLHAGGSGASRVQAFADALDDKFLHDMLAEGLRYSVIREVLPTRRARTFDLEVEELHT |
| | LVAEGVVVHNC ((SEQ ID NO: 28) |
| 37R3-2 INTEIN | CLAEGTRIFDPVTGTTHRIEDVVDGRKPIHVVAAAKDGTLLARPVVSWFDQGTRDVIGLRIAGGAIV |
| | WATPDHKVLTEYGWRAAGELRKGDRVAGPGGSGNSLALSLTADQMVSALLDAEPPILYSEYDPTSPF |
| | SEASMMGLLTNLADRELVHMINWAKRVPGFVDLTLHDQAHLLERAWLEILMIGLVWRSMEHPGKLLF |
| | APNLLLDRNQGKCVEGMVEIFDMLLATSSRFRMMNLQGEEFVCLKSIILLNSGVYTFLSSTLKSLEE |
| | KDHIHRALDKITDTLIHLMAKAGLTLQQQHQRLAQLLLILSHIRHMSNKGMEHLYSMKYKNVVPLYD |
| | LLLEMLDAHRLHAGGSGASRVQAFADALDDKFLHDMLAEGLRYSVIREVLPTRRARTFDLEVEELHT |
| | LVAEGVVVHNC (SEQ ID NO: 29) |
| 37R3-3 INTEIN | CLAEGTRIFDPVTGTTHRIEDVVDGRKPIHVVAVAKDGTLLARPVVSWFDQGTRDVIGLRIAGGATV |
| | WATPDHKVLTEYGWRAAGELRKGDRVAGPGGSGNSLALSLTADQMVSALLDAEPPILYSEYDPTSPF |
| | SEASMMGLLTNLADRELVHMINWAKRVPGFVDLTLHDQAHLLERAWLEILMIGLVWRSMEHPGKLLF |
| | APNLLLDRNQGKCVEGMVEIFDMLLATSSRFRMMNLQGEEFVCLKSIILLNSGVYTFLSSTLKSLEE |
| | KDHIHRALDKITDTLIHLMAKAGLTLQQQHQRLAQLLLILSHIRHMSNKGMEHLYSMKYKNVVPLYD |
| | LLLEMLDAHRLHAGGSGASRVQAFADALDDKFLHDMLAEELRYSVIREVLPTRRARTFDLEVEELHT |
| | LVAEGVVVHNC (SEQ ID NO: 30) |

### Linker

[0080] The term “linker,” as used herein, refers to a chemical group or a molecule linking two molecules or domains, e.g. dCas9 and a deaminase. Typically, the linker is positioned between, or flanked by, two groups, molecules, or other domains and connected to each one via a covalent bond, thus connecting the two. In some embodiments, the linker is an amino acid or a plurality of amino acids (e.g. a peptide or protein). In some embodiments, the linker is an organic molecule, group, polymer, or chemical domain. Chemical groups include, but are not limited to, disulfide, hydrazone, and azide domains. In some embodiments, the linker is 5-100 amino acids in length, for example, 5, 6, 7, 8, 9, 10, 11, 12, 13, 14, 15, 16, 17, 18, 19, 20, 21, 22, 23, 24, 25, 26, 27, 28, 29, 30, 30-35, 35-40, 40-45, 45-50, 50-60, 60-70, 70-80, 80-90, 90-100, 100-150, or 150-200 amino acids in length. Longer or shorter linkers are also contemplated. In some embodiments, the linker is an XTEN linker. In some embodiments, the linker is a 32-amino acid linker. In other embodiments, the linker is a 30-, 31-, 33−or 34-amino acid linker.

### Mutation

[0081] The term “mutation,” as used herein, refers to a substitution of a residue within a sequence, e.g. a nucleic acid or amino acid sequence, with another residue; a deletion or insertion of one or more residues within a sequence; or a substitution of a residue within a sequence of a genome in a subject to be corrected. Mutations are typically described herein by identifying the original residue followed by the position of the residue within the sequence and by the identity of the newly substituted residue. Various methods for making the amino acid substitutions (mutations) provided herein are well known in the art, and are provided by, for example, Green and Sambrook, Molecular Cloning: A Laboratory Manual (4^{th} ed., Cold Spring Harbor Laboratory Press, Cold Spring Harbor, N.Y. (2012)). Mutations can include a variety of categories, such as single base polymorphisms, microduplication regions, indel, and inversions, and is not meant to be limiting in any way. Mutations can include “loss-of-function” mutations which are mutations that reduce or abolish a protein activity. Most loss-of-function mutations are recessive, because in a heterozygote the second chromosome copy carries an unmutated version of the gene coding for a fully functional protein whose presence compensates for the effect of the mutation. There are some exceptions where a loss-of-function mutation is dominant, one example being haploinsufficiency, where the organism is unable to tolerate the approximately 50% reduction in protein activity suffered by the heterozygote. This is the explanation for a few genetic diseases in humans, including Marfan syndrome, which results from a mutation in the gene for the connective tissue protein called fibrillin. Mutations also embrace “gain-of-function” mutations, which is one which confers an abnormal activity on a protein or cell that is otherwise not present in a normal condition. Many gain-of-function mutations are in regulatory sequences rather than in coding regions, and can therefore have a number of consequences. For example, a mutation might lead to one or more genes being expressed in the wrong tissues, these tissues gaining functions that they normally lack. Alternatively the mutation could lead to overexpression of one or more genes involved in control of the cell cycle, thus leading to uncontrolled cell division and hence to cancer. Because of their nature, gain-of-function mutations are usually dominant.

napDNAbp

[0082] The term “napDNAb” which stand for “nucleic acid programmable DNA binding protein” refers to any protein that may associate (e.g., form a complex) with one or more nucleic acid molecules (i.e., which may broadly be referred to as a “napDNAbp-programming nucleic acid molecule” and includes, for example, guide RNA in the case of Cas systems) which direct or otherwise program the protein to localize to a specific target nucleotide sequence (e.g., a gene locus of a genome) that is complementary to the one or more nucleic acid molecules (or a portion or region thereof) associated with the protein, thereby causing the protein to bind to the nucleotide sequence at the specific target site. This term napDNAbp embraces CRISPR-Cas9 proteins, as well as Cas9 equivalents, homologs, orthologs, or paralogs, whether naturally occurring or non-naturally occurring (e.g., engineered or modified), and may include a Cas9 equivalent from any type of CRISPR system (e.g., type II, V, VI), including Cpf1 (a type-V CRISPR-Cas systems), C2c1 (a type V CRISPR-Cas system), C2c2 (a type VI CRISPR-Cas system), C2c3 (a type V CRISPR-Cas system), dCas9, GeoCas9, CjCas9, Cas12a, Cas12b, Cas12c, Cas12d, Cas12g, Cas12h, Cas12i, Cas13d, Cas14, Argonaute, and nCas9. Further Cas-equivalents are described in Makarova et al., “C2c2 is a single-component programmable RNA-guided RNA-targeting CRISPR effector,” Science 2016; 353 (6299), the contents of which are incorporated herein by reference. However, the nucleic acid programmable DNA binding protein (napDNAbp) that may be used in connection with this invention are not limited to CRISPR-Cas systems. The invention embraces any such programmable protein, such as the Argonaute protein from Natronobacteriurn gregoryi (NgAgo) which may also be used for DNA-guided genome editing. NgAgo-guide DNA system does not require a PAM sequence or guide RNA molecules, which means genome editing can be performed simply by the expression of generic NgAgo protein and introduction of synthetic oligonucleotides on any genomic sequence. See Gao et al., DNA-guided genome editing using the Natronobacterium gregoryi Argonaute. Nature Biotechnology 2016; 34(7):768-73, which is incorporated herein by reference.

[0083] In some embodiments, the napDNAbp is a RNA-programmable nuclease, when in a complex with an RNA, may be referred to as a nuclease:RNA complex. Typically, the bound RNA(s) is referred to as a guide RNA (gRNA). gRNAs can exist as a complex of two or more RNAs, or as a single RNA molecule. gRNAs that exist as a single RNA molecule may be referred to as single-guide RNAs (sgRNAs), though “gRNA” is used interchangeably to refer to guide RNAs that exist as either single molecules or as a complex of two or more molecules. Typically, gRNAs that exist as single RNA species comprise two domains: (1) a domain that shares homology to a target nucleic acid (e.g., and directs binding of a Cas9 (or equivalent) complex to the target); and (2) a domain that binds a Cas9 protein. In some embodiments, domain (2) corresponds to a sequence known as a tracrRNA, and comprises a stem-loop structure. For example, in some embodiments, domain (2) is homologous to a tracrRNA as depicted in FIG. 1E of Jinek et al., Science 337:816-821(2012), the entire contents of which is incorporated herein by reference. Other examples of gRNAs (e.g., those including domain 2) can be found in U.S. Pat. No. 9,340,799, entitled “mRNA-Sensing Switchable gRNAs,” and International Patent Application No. PCT/US2014/054247, filed Sep. 6, 2013, published as WO 2015/035136 and entitled “Delivery System For Functional Nucleases,” the entire contents of each are herein incorporated by reference. In some embodiments, a gRNA comprises two or more of domains (1) and (2), and may be referred to as an “extended gRNA.” For example, an extended gRNA will, e.g., bind two or more Cas9 proteins and bind a target nucleic acid at two or more distinct regions, as described herein. The gRNA comprises a nucleotide sequence that complements a target site, which mediates binding of the nuclease/RNA complex to said target site, providing the sequence specificity of the nuclease:RNA complex. In some embodiments, the RNA-programmable nuclease is the (CRISPR-associated system) Cas9 endonuclease, for example Cas9 (Csn1) from Streptococcus pyogenes (see, e.g., “Complete genome sequence of an M1 strain of Streptococcus pyogenes.” Ferretti J. J. et al., Proc. Natl. Acad. Sci. U.S.A. 98:4658-4663(2001); “CRISPR RNA maturation by trans-encoded small RNA and host factor RNase III.” Deltcheva E. et al., Nature 471:602-607(2011); and “A programmable dual-RNA-guided DNA endonuclease in adaptive bacterial immunity.” Jinek M. et al., Science 337:816-821(2012), the entire contents of each of which are incorporated herein by reference. The napDNAbp nucleases (e.g., Cas9) use RNA:DNA hybridization to target DNA cleavage sites, these proteins are able to be targeted, in principle, to any sequence specified by the guide RNA. Methods of using napDNAbp nucleases, such as Cas9, for site-specific cleavage (e.g., to modify a genome) are known in the art (see e.g., Cong, L. et al. Multiplex genome engineering using CRISPR/Cas systems. Science 339, 819-823 (2013); Mali, P. et al. RNA-guided human genome engineering via Cas9. Science 339, 823-826 (2013); Hwang, W. Y. et al. Efficient genome editing in zebrafish using a CRISPR-Cas system. Nature Biotechnology 31, 227-229 (2013); Jinek, M. et al. RNA-programmed genome editing in human cells. eLife 2, e00471 (2013); Dicarlo, J. E. et al., Genome engineering in Saccharomyces cerevisiae using CRISPR-Cas systems. Nucleic Acid Res. (2013); Jiang, W. et al. RNA-guided editing of bacterial genomes using CRISPR-Cas systems. Nature Biotechnology 31, 233-239 (2013); the entire contents of each of which are incorporated herein by reference).

### Nickase

[0084] The term “nickase” refers to a napDNAbp having only a single nuclease activity (e.g., one of the two nuclease domain is inactivated) that cuts only one strand of a target DNA, rather than both strands. Thus, a nickase type napDNAbp does not leave a double-strand break.

### Nuclear Localization Signal

[0085] A nuclear localization signal or sequence (NLS) is an amino acid sequence that tags, designates, or otherwise marks a protein for import into the cell nucleus by nuclear transport. Typically, this signal consists of one or more short sequences of positively charged lysines or arginines exposed on the protein surface. Different nuclear localized proteins may share the same NLS. An NLS has the opposite function of a nuclear export signal (NES), which targets proteins out of the nucleus. Thus, a single nuclear localization signal can direct the entity with which it is associated to the nucleus of a cell. Such sequences may be of any size and composition, for example more than 25, 25, 15, 12, 10, 8, 7, 6, 5, or 4 amino acids, but will preferably comprise at least a four to eight amino acid sequence known to function as a nuclear localization signal (NLS).

### Nucleic Acid Molecule

[0086] The term “nucleic acid molecule” as used herein, refers to RNA as well as single and/or double-stranded DNA. Nucleic acid molecules may be naturally occurring, for example, in the context of a genome, a transcript, an mRNA, tRNA, rRNA, siRNA, snRNA, a plasmid, cosmid, chromosome, chromatid, or other naturally occurring nucleic acid molecule. On the other hand, a nucleic acid molecule may be a non-naturally occurring molecule, e.g. a recombinant DNA or RNA, an artificial chromosome, an engineered genome, or fragment thereof, or a synthetic DNA, RNA, DNA/RNA hybrid, or including non-naturally occurring nucleotides or nucleosides. Furthermore, the terms “nucleic acid,” “DNA,” “RNA,” and/or similar terms include nucleic acid analogs, e.g. analogs having other than a phosphodiester backbone. Nucleic acids may be purified from natural sources, produced using recombinant expression systems and optionally purified, chemically synthesized, etc. Where appropriate, e.g. in the case of chemically synthesized molecules, nucleic acids may comprise nucleoside analogs such as analogs having chemically modified bases or sugars, and backbone modifications. A nucleic acid sequence is presented in the 5′ to 3′ direction unless otherwise indicated. In some embodiments, a nucleic acid is or comprises natural nucleosides (e.g. adenosine, thymidine, guanosine, cytidine, uridine, deoxyadenosine, deoxythymidine, deoxyguanosine, and deoxycytidine); nucleoside analogs (e.g. 2-aminoadenosine, 2-thiothymidine, inosine, pyrrolo-pyrimidine, 3-methyl adenosine, 5-methylcytidine, 2-aminoadenosine, C5-bromouridine, C5-fluorouridine, C5-iodouridine, C5-propynyl-uridine, C5-propynyl-cytidine, C5-methylcytidine, 2-aminoadeno sine, 7-deazaadenosine, 7-deazaguanosine, inosinedenosine, 8-oxoguanosine, 0(6)-methylguanine, and 2-thiocytidine); chemically modified bases; biologically modified bases (e.g. methylated bases); intercalated bases; modified sugars (e.g. 2′-fluororibose, ribose, 2′-deoxyribose, arabinose, and hexose); and/or modified phosphate groups (e.g. phosphorothioates and 5′-N-phosphoramidite linkages).

### PACE

[0087] The term “phage-assisted continuous evolution (PACE),” as used herein, refers to continuous evolution that employs phage as viral vectors. The general concept of PACE technology has been described, for example, in International PCT Application, PCT/US2009/056194, filed Sep. 8, 2009, published as WO 2010/028347 on Mar. 11, 2010; International PCT Application, PCT/US2011/066747, filed Dec. 22, 2011, published as WO 2012/088381 on Jun. 28, 2012; U.S. Application, U.S. Pat. No. 9,023,594, issued May 5, 2015, International PCT Application, PCT/US2015/012022, filed Jan. 20, 2015, published as WO 2015/134121 on Sep. 11, 2015, and International PCT Application, PCT/US2016/027795, filed Apr. 15, 2016, published as WO 2016/168631 on Oct. 20, 2016, the entire contents of each of which are incorporated herein by reference.

### Promoter

[0088] The term “promoter” is art-recognized and refers to a nucleic acid molecule with a sequence recognized by the cellular transcription machinery and able to initiate transcription of a downstream gene. A promoter may be constitutively active, meaning that the promoter is always active in a given cellular context, or conditionally active, meaning that the promoter is only active in the presence of a specific condition. For example, a conditional promoter may only be active in the presence of a specific protein that connects a protein associated with a regulatory element in the promoter to the basic transcriptional machinery, or only in the absence of an inhibitory molecule. A subclass of conditionally active promoters is inducible promoters that require the presence of a small molecule “inducer” for activity. Examples of inducible promoters include, but are not limited to, arabinose-inducible promoters, Tet-on promoters, and tamoxifen-inducible promoters. A variety of constitutive, conditional, and inducible promoters are well known to the skilled artisan, and the skilled artisan will be able to ascertain a variety of such promoters useful in carrying out the instant invention, which is not limited in this respect. In various embodiments, the disclosure provides vectors with appropriate promoters for driving expression of the nucleic acid sequences encoding the fusion proteins (or one or more individual components thereof).

### Protospacer

[0089] As used herein, the term “protospacer” refers to the sequence (˜20 bp) in DNA adjacent to the PAM (protospacer adjacent motif) sequence. The protospacer shares the same or substantially the same sequence as the spacer sequence of the guide RNA. The guide RNA anneals to the complement of the protospacer sequence on the target DNA (specifically, one strand thereof, i.e., the “target strand” versus the “non-target strand” of the target DNA sequence). In order for Cas9 to function it also requires a specific protospacer adjacent motif (PAM) that varies depending on the bacterial species of the Cas9 gene. The most commonly used Cas9 nuclease, derived from S. pyogenes, recognizes a PAM sequence of NGG that is found directly downstream of the protospacer sequence in the genomic DNA, on the non-target strand. The skilled person will appreciate that the literature in the state of the art sometimes refers to the “protospacer” as the ˜20-nt target-specific guide sequence on the guide RNA itself, rather than referring to it as a “spacer.” Thus, in some cases, the term “protospacer” as used herein may be used interchangeably with the term “spacer.” The context of the description surrounding the appearance of either “protospacer” or “spacer” will help inform the reader as to whether the term is reference to the gRNA or the DNA sequence.

### Protospacer Adjacent Motif (PAM)

[0090] As used herein, the term “protospacer adjacent sequence” or “PAM” refers to an approximately 2-6 base pair DNA sequence that is an important targeting component of a Cas9 nuclease. The canonical PAM sequence (i.e., the PAM sequence that is associated with the Cas9 nuclease of Streptococcus pyogenes or SpCas9) is 5′-NGG-3′ wherein “N” is any nucleobase followed by two guanine (“G”) nucleobases. Different PAM sequences can be associated with different Cas9 nucleases or equivalent proteins from different organisms. In addition, any given Cas9 nuclease, e.g., SpCas9, may be modified to alter the PAM specificity of the nuclease such that the nuclease recognizes alternative PAM sequence.

[0091] For example, with reference to the canonical SpCas9 amino acid sequence is SEQ ID NO: 74, the PAM sequence can be modified by introducing one or more mutations, including (a) D1135V, R1335Q, and T1337R “the VQR variant”, which alters the PAM specificity to NGAN or NGNG, (b) D1135E, R1335Q, and T1337R “the EQR variant”, which alters the PAM specificity to NGAG, and (c) D1135V, G1218R, R1335E, and T1337R “the VRER variant”, which alters the PAM specificity to NGCG. In addition, the D1135E variant of canonical SpCas9 still recognizes NGG, but it is more selective compared to the wild type SpCas9 protein.

[0092] It will also be appreciated that Cas9 enzymes from different bacterial species (i.e., Cas9 orthologs) can have varying PAM specificities. For example, Cas9 from Staphylococcus aureus (SaCas9) recognizes NGRRT or NGRRN. In addition, Cas9 from Neisseria meningitis (NmCas) recognizes NNNNGATT. In another example, Cas9 from Streptococcus thermophilis (StCas9) recognizes NNAGAAW. In still another example, Cas9 from Treponema denticola (TdCas) recognizes NAAAAC. These are examples and are not meant to be limiting. It will be further appreciated that non-SpCas9s bind a variety of PAM sequences, which makes them useful when no suitable SpCas9 PAM sequence is present at the desired target cut site. Furthermore, non-SpCas9s may have other characteristics that make them more useful than SpCas9. For example, Cas9 from Staphylococcus aureus (SaCas9) is about 1 kilobase smaller than SpCas9, so it can be packaged into adeno-associated virus (AAV). Further reference may be made to Shah et al., “Protospacer recognition motifs: mixed identities and functional diversity,” RNA Biology, 10(5): 891-899 (which is incorporated herein by reference).

### Protein, Peptide, and Polypeptide

[0093] The terms “protein,” “peptide,” and “polypeptide” are used interchangeably herein, and refer to a polymer of amino acid residues linked together by peptide (amide) bonds. The terms refer to a protein, peptide, or polypeptide of any size, structure, or function. Typically, a protein, peptide, or polypeptide will be at least three amino acids long. A protein, peptide, or polypeptide may refer to an individual protein or a collection of proteins. One or more of the amino acids in a protein, peptide, or polypeptide may be modified, for example, by the addition of a chemical entity such as a carbohydrate group, a hydroxyl group, a phosphate group, a farnesyl group, an isofarnesyl group, a fatty acid group, a linker for conjugation, functionalization, or other modification, etc. A protein, peptide, or polypeptide may also be a single molecule or may be a multi-molecular complex. A protein, peptide, or polypeptide may be just a fragment of a naturally occurring protein or peptide. A protein, peptide, or polypeptide may be naturally occurring, recombinant, or synthetic, or any combination thereof. The term “fusion protein” as used herein refers to a hybrid polypeptide which comprises protein domains from at least two different proteins. One protein may be located at the amino-terminal (N-terminal) portion of the fusion protein or at the carboxy-terminal (C-terminal) protein thus forming an “amino-terminal fusion protein” or a “carboxy-terminal fusion protein,” respectively. A protein may comprise different domains, for example, a nucleic acid binding domain (e.g., the gRNA binding domain of Cas9 that directs the binding of the protein to a target site) and a nucleic acid cleavage domain or a catalytic domain of a recombinase. In some embodiments, a protein comprises a proteinaceous part, e.g., an amino acid sequence constituting a nucleic acid binding domain, and an organic compound, e.g., a compound that can act as a nucleic acid cleavage agent. In some embodiments, a protein is in a complex with, or is in association with, a nucleic acid, e.g., RNA. Any of the proteins provided herein may be produced by any method known in the art. For example, the proteins provided herein may be produced via recombinant protein expression and purification, which is especially suited for fusion proteins comprising a peptide linker. Methods for recombinant protein expression and purification are well known, and include those described by Green and Sambrook, Molecular Cloning: A Laboratory Manual (4th ed., Cold Spring Harbor Laboratory Press, Cold Spring Harbor, N.Y. (2012)), the entire contents of which are incorporated herein by reference. It should be appreciated that the disclosure provides any of the polypeptide sequences provided herein without an N-terminal methionine (M) residue.

### RNA-Protein Recruitment System

[0094] In various embodiments, two separate protein domains (e.g., a Cas9 domain and a cytidine deaminase domain) may be colocalized to one another to form a functional complex (akin to the function of a fusion protein comprising the two separate protein domains) by using an “RNA-protein recruitment system,” such as the “MS2 tagging technique.” Such systems generally tag one protein domain with an “RNA-protein interaction domain” (aka “RNA-protein recruitment domain”) and the other with an “RNA-binding protein” that specifically recognizes and binds to the RNA-protein interaction domain, e.g., a specific hairpin structure. These types of systems can be leveraged to colocalize the domains of a base editor, as well as to recruitment additional functionalities to a base editor, such as a UGI domain. In one example, the MS2 tagging technique is based on the natural interaction of the MS2 bacteriophage coat protein (“MCP” or “MS2cp”) with a stem-loop or hairpin structure present in the genome of the phage, i.e., the “MS2 hairpin.” In the case of the MS2 hairpin, it is recognized and bound by the MS2 bacteriophage coat protein (MCP). Thus, in one exemplary scenario a deaminase-MS2 fusion can recruit a Cas9-MCP fusion. A review of other modular RNA-protein interaction domains are described in the art, for example, in Johansson et al., “RNA recognition by the MS2 phage coat protein,” Sem Virol., 1997, Vol. 8(3): 176-185; Delebecque et al., “Organization of intracellular reactions with rationally designed RNA assemblies,” Science, 2011, Vol. 333: 470-474; Mali et al., “Cas9 transcriptional activators for target specificity screening and paired nickases for cooperative genome engineering,” Nat. Biotechnol., 2013, Vol. 31: 833-838; and Zalatan et al., “Engineering complex synthetic transcriptional programs with CRISPR RNA scaffolds,” Cell, 2015, Vol. 160: 339-350, each of which are incorporated herein by reference in their entireties. Other systems include the PP7 hairpin, which specifically recruits the PCP protein, and the “corn” hairpin, which specifically recruits the Com protein. See Zalatan et al. The nucleotide sequence of the MS2 hairpin (or equivalently referred to as the “MS2 aptamer”) is: GCCAACATGAGGATCACCCATGTCTGCAGGGCC (SEQ ID NO: 31). The amino acid sequence of the MCP or MS2cp is:

(SEQ ID NO: 32)
GSASNFTQFVLVDNGGTGDVTVAPSNFANGVAEWISSNSRSQAYKVTCSV
RQSSAQNRKYTIKVEVPKVATQTVGGEELPVAGWRSYLNMELTIPIFATN
SDCELIVKAMQGLLKDGNPIPSAIAANSGIY.

### Sense Strand

[0095] In genetics, a “sense” strand is the segment within double-stranded DNA that runs from 5′ to 3′, and which is complementary to the antisense strand of DNA, or template strand, which runs from 3′ to 5′. In the case of a DNA segment that encodes a protein, the sense strand is the strand of DNA that has the same sequence as the mRNA, which takes the antisense strand as its template during transcription, and eventually undergoes (typically, not always) translation into a protein. The antisense strand is thus responsible for the RNA that is later translated to protein, while the sense strand possesses a nearly identical makeup to that of the mRNA. Note that for each segment of dsDNA, there will possibly be two sets of sense and antisense, depending on which direction one reads (since sense and antisense is relative to perspective). It is ultimately the gene product, or mRNA, that dictates which strand of one segment of dsDNA is referred to as sense or antisense.

[0096] In the context of a PEgRNA, the first step is the synthesis of a single-strand complementary DNA (i.e., the 3′ ssDNA flap, which becomes incorporated) oriented in the 5′ to 3′ direction which is templated off of the PEgRNA extension arm. Whether the 3′ ssDNA flap should be regarded as a sense or antisense strand depends on the direction of transcription since it well accepted that both strands of DNA may serve as a template for transcription (but not at the same time). Thus, in some embodiments, the 3′ ssDNA flap (which overall runs in the 5′ to 3′ direction) will serve as the sense strand because it is the coding strand. In other embodiments, the 3′ ssDNA flap (which overall runs in the 5′ to 3′ direction) will serve as the antisense strand and thus, the template for transcription.

### Spacer Sequence

[0097] As used herein, the term “spacer sequence” in connection with a guide RNA refers to the portion of the guide RNA of about 20 nucleotides which contains a nucleotide sequence that is the same or substantially the same as the protospacer sequence adjacent the PAM in the target DNA sequence. The spacer sequence anneals to the complement of the protospacer sequence to form a ssRNA/ssDNA hybrid structure at the target site and a corresponding R loop ssDNA structure of the endogenous DNA strand that comprises the protospacer sequence.

### Subject

[0098] The term “subject,” as used herein, refers to an individual organism, for example, an individual mammal. In some embodiments, the subject is a human. In some embodiments, the subject is a non-human mammal. In some embodiments, the subject is a non-human primate. In some embodiments, the subject is a rodent. In some embodiments, the subject is a sheep, a goat, a cattle, a cat, or a dog. In some embodiments, the subject is a vertebrate, an amphibian, a reptile, a fish, an insect, a fly, or a nematode. In some embodiments, the subject is a research animal. In some embodiments, the subject is genetically engineered, e.g., a genetically engineered non-human subject. The subject may be of either sex and at any stage of development.

### Target Site

[0099] The term “target site” refers to a sequence within a nucleic acid molecule that is edited by a base editor (BE) disclosed herein. The term “target site,” in the context of a single strand, also can refer to the “target strand” which anneals or binds to the spacer sequence of the guide RNA. The target site can refer, in certain embodiments, to a segment of double-stranded DNA that includes the protospacer (i.e., the strand of the target site that has the same nucleotide sequence as the spacer sequence of the guide RNA) on the PAM-strand (or non-target strand) and target strand, which is complementary to the protospacer and the spacer alike, and which anneals to the spacer of the guide RNA, thereby targeting or programming a Cas9 base editor to target the target site.

### Transcription Terminator

[0100] A “transcriptional terminator” is a nucleic acid sequence that causes transcription to stop. A transcriptional terminator may be unidirectional or bidirectional. It is comprised of a DNA sequence involved in specific termination of an RNA transcript by an RNA polymerase. A transcriptional terminator sequence prevents transcriptional activation of downstream nucleic acid sequences by upstream promoters. A transcriptional terminator may be necessary in vivo to achieve desirable expression levels or to avoid transcription of certain sequences. A transcriptional terminator is considered to be “operably linked to” a nucleotide sequence when it is able to terminate the transcription of the sequence it is linked to. The most commonly used type of terminator is a forward terminator. When placed downstream of a nucleic acid sequence that is usually transcribed, a forward transcriptional terminator will cause transcription to abort. In some embodiments, bidirectional transcriptional terminators are provided, which usually cause transcription to terminate on both the forward and reverse strand. In some embodiments, reverse transcriptional terminators are provided, which usually terminate transcription on the reverse strand only.

[0101] In prokaryotic systems, terminators usually fall into two categories (1) rho-independent terminators and (2) rho-dependent terminators. Rho-independent terminators are generally composed of palindromic sequence that forms a stem loop rich in G-C base pairs followed by several T bases. Without wishing to be bound by theory, the conventional model of transcriptional termination is that the stem loop causes RNA polymerase to pause, and transcription of the poly-A tail causes the RNA:DNA duplex to unwind and dissociate from RNA polymerase.

[0102] In eukaryotic systems, the terminator region may comprise specific DNA sequences that permit site-specific cleavage of the new transcript so as to expose a polyadenylation site. This signals a specialized endogenous polymerase to add a stretch of about 200 A residues (polyA) to the 3′ end of the transcript. RNA molecules modified with this polyA tail appear to more stable and are translated more efficiently. Thus, in some embodiments involving eukaryotes, a terminator may comprise a signal for the cleavage of the RNA. In some embodiments, the terminator signal promotes polyadenylation of the message. The terminator and/or polyadenylation site elements may serve to enhance output nucleic acid levels and/or to minimize read through between nucleic acids.

[0103] Terminators for use in accordance with the present disclosure include any terminator of transcription described herein or known to one of ordinary skill in the art. Examples of terminators include, without limitation, the termination sequences of genes such as, for example, the bovine growth hormone terminator, and viral termination sequences such as, for example, the SV40 terminator, spy, yejM, secG-leuU, thrLABC, rrnB T1, hisLGDCBHAFI, metZWV, rrnC, xapR, aspA and arcA terminator. In some embodiments, the termination signal may be a sequence that cannot be transcribed or translated, such as those resulting from a sequence truncation.

### Transition

[0104] As used herein, “transitions” refer to the interchange of purine nucleobases (A ↔G) or the interchange of pyrimidine nucleobases (C ↔T). This class of interchanges involves nucleobases of similar shape. The compositions and methods disclosed herein are capable of inducing one or more transitions in a target DNA molecule. The compositions and methods disclosed herein are also capable of inducing both transitions and transversion in the same target DNA molecule. These changes involve A ↔G, G ↔A, C ↔T, or T ↔C. In the context of a double-strand DNA with Watson-Crick paired nucleobases, transitions refer to the following base pair exchanges: A:T ↔G:C, G:G ↔A:T, C:G ↔T:A, or T:A↔C:G. The compositions and methods disclosed herein are capable of inducing one or more transitions in a target DNA molecule. The compositions and methods disclosed herein are also capable of inducing both transitions and transversion in the same target DNA molecule, as well as other nucleotide changes, including deletions and insertions.

### Transversion

[0105] As used herein, “transversions” refer to the interchange of purine nucleobases for pyrimidine nucleobases, or in the reverse and thus, involve the interchange of nucleobases with dissimilar shape. These changes involve T ↔A, T↔G, C ↔G, C ↔A, A ↔T, A ↔C, G ↔C, and G ↔T. In the context of a double-strand DNA with Watson-Crick paired nucleobases, transversions refer to the following base pair exchanges: T:A ↔A:T, T:A ↔G:C, C:G ↔G:C, C:G ↔A:T, A:T ↔T:A, A:T ↔C:G, G:C ↔C:G, and G:C ↔T:A. The compositions and methods disclosed herein are capable of inducing one or more transversions in a target DNA molecule. The compositions and methods disclosed herein are also capable of inducing both transitions and transversion in the same target DNA molecule, as well as other nucleotide changes, including deletions and insertions.

### Treatment

[0106] The terms “treatment,” “treat,” and “treating,” refer to a clinical intervention aimed to reverse, alleviate, delay the onset of, or inhibit the progress of a disease or disorder, or one or more symptoms thereof, as described herein. As used herein, the terms “treatment,” “treat,” and “treating” refer to a clinical intervention aimed to reverse, alleviate, delay the onset of, or inhibit the progress of a disease or disorder, or one or more symptoms thereof, as described herein. In some embodiments, treatment may be administered after one or more symptoms have developed and/or after a disease has been diagnosed. In other embodiments, treatment may be administered in the absence of symptoms, e.g., to prevent or delay onset of a symptom or inhibit onset or progression of a disease. For example, treatment may be administered to a susceptible individual prior to the onset of symptoms (e.g., in light of a history of symptoms and/or in light of genetic or other susceptibility factors). Treatment may also be continued after symptoms have resolved, for example, to prevent or delay their recurrence.

### Upstream

[0107] As used herein, the terms “upstream” and “downstream” are terms of relativety that define the linear position of at least two elements located in a nucleic acid molecule (whether single or double-stranded) that is orientated in a 5′-to-3′ direction. In particular, a first element is upstream of a second element in a nucleic acid molecule where the first element is positioned somewhere that is 5′ to the second element. For example, a SNP is upstream of a Cas9-induced nick site if the SNP is on the 5′ side of the nick site. Conversely, a first element is downstream of a second element in a nucleic acid molecule where the first element is positioned somewhere that is 3′ to the second element. For example, a SNP is downstream of a Cas9-induced nick site if the SNP is on the 3′ side of the nick site. The nucleic acid molecule can be a DNA (double or single stranded). RNA (double or single stranded), or a hybrid of DNA and RNA. The analysis is the same for single strand nucleic acid molecule and a double strand molecule since the terms upstream and downstream are in reference to only a single strand of a nucleic acid molecule, except that one needs to select which strand of the double stranded molecule is being considered. Often, the strand of a double stranded DNA which can be used to determine the positional relativity of at least two elements is the “sense” or “coding” strand. In genetics, a “sense” strand is the segment within double-stranded DNA that runs from 5′ to 3′, and which is complementary to the antisense strand of DNA, or template strand, which runs from 3′ to 5′. Thus, as an example, a SNP nucleobase is “downstream” of a promoter sequence in a genomic DNA (which is double-stranded) if the SNP nucleobase is on the 3′ side of the promoter on the sense or coding strand.

### Uracil Glycosylase Inhibitor

[0108] The term “uracil glycosylase inhibitor” or “UGI,” as used herein, refers to a protein that is capable of inhibiting a uracil-DNA glycosylase base-excision repair enzyme. In some embodiments, a UGI domain comprises a wild-type UGI or a UGI as set forth in SEQ ID NO: 41. In some embodiments, the UGI proteins provided herein include fragments of UGI and proteins homologous to a UGI or a UGI fragment. For example, in some embodiments, a UGI domain comprises a fragment of the amino acid sequence set forth in SEQ ID NO: 41. In some embodiments, a UGI fragment comprises an amino acid sequence that comprises at least 60%, at least 65%, at least 70%, at least 75%, at least 80%, at least 85%, at least 90%, at least 95%, at least 96%, at least 97%, at least 98%, at least 99%, or at least 99.5% of the amino acid sequence as set forth in SEQ ID NO: 41. In some embodiments, a UGI comprises an amino acid sequence homologous to the amino acid sequence set forth in SEQ ID NO: 41, or an amino acid sequence homologous to a fragment of the amino acid sequence set forth in SEQ ID NO: 41. In some embodiments, proteins comprising UGI or fragments of UGI or homologs of UGI or UGI fragments are referred to as “UGI variants.” A UGI variant shares homology to UGI, or a fragment thereof. For example a UGI variant is at least 70% identical, at least 75% identical, at least 80% identical, at least 85% identical, at least 90% identical, at least 95% identical, at least 96% identical, at least 97% identical, at least 98% identical, at least 99% identical, at least 99.5% identical, or at least 99.9% identical to a wild type UGI or a UGI as set forth in SEQ ID NO: 41. In some embodiments, the UGI variant comprises a fragment of UGI, such that the fragment is at least 70% identical, at least 80% identical, at least 90% identical, at least 95% identical, at least 96% identical, at least 97% identical, at least 98% identical, at least 99% identical, at least 99.5% identical, or at least 99.9% to the corresponding fragment of wild-type UGI or a UGI as set forth in SEQ ID NO: 41. In some embodiments, the UGI comprises the following amino acid sequence:

(SEQ ID NO: 41)
MTNLSDIIEKETGKQLVIQESILMLPEEVEEVIGNKPESDILVHTAYDES
TDENVMLLTSDAPEYKPWALVIQDSNGENKIKML (P14739|UNGI_
BPPB2 Uracil-DNA glycosylase inhibitor).

### Variant

[0109] As used herein, the term “variant” refers to a protein having one or more changes, e.g., an amino acid substitution or deletion or other sequence changes, relevative to a reference protein, e.g., a wildtype protein. In some embodiments, a “variant” is at least about 70% identical, at least about 80% identical, at least about 90% identical, at least about 95% identical, at least about 96% identical, at least about 97% identical, at least about 98% identical, at least about 99% identical, at least about 99.5% identical, or at least about 99.9% identical to a reference protein, e.g., a wildtype protein. In various embodiments, the disclosure provides variant napDNAbps (e.g., variant Cas9 proteins), variant adenosine deaminases, and variant cytidine deaminases. For instance, a variant of Cas9 may comprise a Cas9 that has one or more changes in amino acid residues as compared to a wild type Cas9 amino acid sequence. As another example, a variant of a deaminase may comprise a deaminase that has one or more changes in amino acid residues as compared to a wild type deaminase amino acid sequence, e.g. following ancestral sequence reconstruction of the deaminase. These changes include chemical modifications, including substitutions of different amino acid residues truncations, covalent additions (e.g. of a tag), and any other mutations. The term also encompasses circular permutants, mutants, truncations, or domains of a reference sequence, and which display the same or substantially the same functional activity or activities as the reference sequence. This term also embraces fragments of a wild type protein.

[0110] The level or degree of which the property is retained may be reduced relative to the wild type protein but is typically the same or similar in kind. Generally, variants are overall very similar, and in many regions, identical to the amino acid sequence of the protein described herein. A skilled artisan will appreciate how to make and use variants that maintain all, or at least some, of a functional ability or property.

[0111] The variant proteins may comprise, or alternatively consist of, an amino acid sequence which is at least 80%, 85%, 90%, 95%, 96%, 97%, 98%, 99%, or 100%, identical to, for example, the amino acid sequence of a wild-type protein, or any protein provided herein.

[0112] By a polypeptide having an amino acid sequence at least, for example, 95% “identical” to a query amino acid sequence, it is intended that the amino acid sequence of the subject polypeptide is identical to the query sequence except that the subject polypeptide sequence may include up to five amino acid alterations per each 100 amino acids of the query amino acid sequence. In other words, to obtain a polypeptide having an amino acid sequence at least 95% identical to a query amino acid sequence, up to 5% of the amino acid residues in the subject sequence may be inserted, deleted, or substituted with another amino acid. These alterations of the reference sequence may occur at the amino- or carboxy-terminal positions of the reference amino acid sequence or anywhere between those terminal positions, interspersed either individually among residues in the reference sequence or in one or more contiguous groups within the reference sequence.

[0113] As a practical matter, whether any particular polypeptide is at least 80%, 85%, 90%, 95%, 96%, 97%, 98%, or 99% identical to, for instance, the amino acid sequence of a protein, such as, but not limited to a STAT3 protein, a deaminase protein, or an napDNAbp, can be determined conventionally using known computer programs. A preferred method for determining the best overall match between a query sequence (a sequence of the present invention) and a subject sequence, also referred to as a global sequence alignment, can be determined using the FASTDB computer program based on the algorithm of Brutlag et al. (Comp. App. Biosci. 6:237-245 (1990)). In a sequence alignment the query and subject sequences are either both nucleotide sequences or both amino acid sequences. The result of said global sequence alignment is expressed as percent identity. Preferred parameters used in a FASTDB amino acid alignment are: Matrix=PAM 0, k-tuple=2, Mismatch Penalty=1, Joining Penalty=20, Randomization Group Length=0, Cutoff Score=1, Window Size=sequence length, Gap Penalty=5, Gap Size Penalty=0.05, Window Size=500 or the length of the subject amino acid sequence, whichever is shorter.

If the subject sequence is shorter than the query sequence due to N- or C-terminal deletions, not because of internal deletions, a manual correction must be made to the results. This is because the FASTDB program does not account for N- and C-terminal truncations of the subject sequence when calculating global percent identity. For subject sequences truncated at the N- and C-termini, relative to the query sequence, the percent identity is corrected by calculating the number of residues of the query sequence that are N- and C-terminal of the subject sequence, which are not matched/aligned with a corresponding subject residue, as a percent of the total bases of the query sequence. Whether a residue is matched/aligned is determined by results of the FASTDB sequence alignment. This percentage is then subtracted from the percent identity, calculated by the above FASTDB program using the specified parameters, to arrive at a final percent identity score. This final percent identity score is what is used for the purposes of the present invention. Only residues to the N- and C-termini of the subject sequence, which are not matched/aligned with the query sequence, are considered for the purposes of manually adjusting the percent identity score. That is, only query residue positions outside the farthest N- and C-terminal residues of the subject sequence.

### Vector

[0114] The term “vector,” as used herein, refers to a nucleic acid that can be modified to encode a gene of interest and that is able to enter into a host cell, mutate and replicate within the host cell, and then transfer a replicated form of the vector into another host cell. Exemplary suitable vectors include viral vectors, such as retroviral vectors or bacteriophages and filamentous phage, and conjugative plasmids. Additional suitable vectors will be apparent to those of skill in the art based on the instant disclosure.

### Wild Type

[0115] As used herein the term “wild type” or “wildtype” is a term of the art understood by skilled persons and means the typical form of an organism, strain, gene or characteristic as it occurs in nature as distinguished from mutant or variant forms.

[0116] These and other exemplary substituents are described in more detail in the Detailed Description, Examples, and claims. The invention is not intended to be limited in any manner by the above exemplary listing of substituents.

### DETAILED DESCRIPTION OF CERTAIN EMBODIMENTS

[0117] The present disclosure provides compositions, kits, and methods for modifying a polynucleotide using base editing strategies that comprise the use of a nucleic acid programmable DNA binding protein (“napDNAbp”), a deaminase (e.g., a cytidine or adenosine deaminase) and a suitable guide RNA that targets the STAT3 gene in order to treat STAT3-dependent cancers. In various embodiments, the base editing is used to modify the nucleotide sequence of the STAT3 gene such that STAT3 signaling is reduced or otherwise eliminated. For example, in one embodiment base editing is used to reduce or eliminate STAT3 signaling by changing the STAT3 gene sequence to remove one or more STAT3 phosphorylation sites (e.g., modifying the nucleotide sequence of the STAT3 gene to eliminate the phosphorylation sites at Y705 and/or S727), thereby preventing the protein from dimerizing to form an activated transcription factor which normally translocates into the nucleus and acts to transcriptionally regulate a range of genes associated with cancer progression. In certain embodiments, the disclosure provides phosphorylation-deficient STAT3 variants having one or more amino acid substitutions that block, inhibit, or otherwise reduce phosphorylation of STAT3 at one or more sites of phosphorylation, including Tyr705 and Ser727 of the canonical STAT3 protein (SEQ ID NO: 33). In some embodiments, the one or more amino acid substitutions that block, inhibit, or otherwise reduce phosphorylation of STAT3 may comprise an amino acid substitution at one or more phosphorylation sites (e.g., a substitution at Tyr705 and/or Ser727), or alternately, the amino acid substitution may be at one or more residues that inhibit, reduce, or otherwise block phosphorylation of a phosphorylation site of STAT3, e.g., Tyr705 and/or Ser727 of STAT3, but which are sites that are not themselves phosphorylated. In other words, phosphorylation of STAT3 may be inhibited, reduced, or blocked by altering using the base editors disclosed herein one or more amino acids in STAT3—including actual phosphorylation sites, including Tyr705 and Ser727, or amino acid sites that are not themselves phosphorylated but which block, inhibit, or otherwise reduce phosphorylation of STAT3.

[0118] Some aspects of this disclosure relate to methods and compositions useful for treating cancers, such as glioblastoma or melanoma. In some embodiments, the disclosure provides guide sequences capable of directing base editors (e.g., adenosine base editors or cytidine base editors) to the Y705 and/or S727 positions of a STAT3 gene to treat a cancer (e.g., glioblastoma or melanoma). In some aspects, the disclosure provides proteins that deaminate the nucleobase adenine, for example in an STAT3 gene to treat a cancer (e.g., glioblastoma or melanoma). STAT3 exists predominantly in two isoforms: STAT3α and STAT3β. STAT3 or STAT3α, is the full-length (770 amino acid; 92 kDa) protein, whereas STAT3β (83 kDa) is a truncated form generated by alternative splicing of exon 23. As a result, STAT3β lacks the 55-residue C-terminal transactivation domain of STAT3α, which is replaced with seven unique amino acids. Also, STAT3β comprises Y705, but lacks S727. There are two other lesser-characterized isoforms of STAT3 as well: STAT3γ (72 kDa) and STAT3δ (64 kDa).

[0119] The base editors embrace any type of base editor, and in particular, are exemplified herein using adenosine base editors (i.e., capable of installing A-to-G edits, a type of transition editor) to account for a variety of genetic strategies that reduce or eliminate STAT3 signaling, e.g., by eliminating the phosphorylation sites at Y705 and/or S727 of SEQ ID NO: 74, or at the corresponding amino acid positions of a polypeptide having at least 80% sequence identity to SEQ ID NO: 74.

[0120] In some embodiments, the base editor nicks the target sequence that is complementary to the guide sequence. In some embodiments, the base editor is a circular permutant (CP) adenine base editor, such as the CP₁₀₄₀ base editor. In some embodiments, the base editor may be formulated as a split-intein base editor. The base editor may be, for example, wild-type SpCas9, SaCas9-KKH, Cas9-VQR, Cas9-VRQR, Cas9-VRER, Cas9-NG, CP1028, CP1041, CP1041-NG, Cpf1, iSpyMac, SpCas9-NRRH, or SpCas9-NRCH.

[0121] This disclosure describes adenosine deaminase proteins that are capable of deaminating (i.e., removing an amine group) adenine of a deoxyadenosine residue in deoxyribonucleic acid (DNA). For example, the adenosine deaminases provided herein are capable of deaminating adenine of a deoxyadenosine residue of DNA. Other aspects of the disclosure provide fusion proteins that comprise an adenosine deaminase (e.g., an adenosine deaminase that deaminates deoxyadenosine in DNA as described herein) and a domain (e.g., a Cas9 or a Cpf1 protein) capable of binding to a specific nucleotide sequence. The deamination of an adenosine by an adenosine deaminase can lead to a point mutation. This process is referred to herein as nucleic acid editing. For example, the adenosine may be converted to an inosine residue, which typically base pairs with a cytosine residue. Such fusion proteins are useful inter alia for targeted editing of nucleic acid sequences. Such fusion proteins may be used for targeted editing of DNA in vitro, e.g., for the generation of mutant cells or animals; for the introduction of targeted mutations, e.g., for the correction of genetic defects in cells ex vivo, e.g., in cells obtained from a subject that are subsequently re-introduced into the same or another subject; and for the introduction of targeted mutations in vivo, e.g., the correction of genetic defects or the introduction of deactivating mutations in disease-associated genes in a subject. As an example, diseases that can be treated by making an A to G, or a T to C mutation, may be treated using the nucleobase editors provided herein. The adenosine base editors described herein may be utilized for the targeted editing of such G to A mutations so as to generate STAT3 proteins that cannot be activated (i.e., that is incapable of phosphorylation). The compositions and methods described herein were shown to have a better effect on STAT3 expression over time, as compared to traditional STAT3 inhibitors, which showed reduced efficacy over time. The invention provides deaminases, fusion proteins, nucleic acids, vectors, cells, compositions, methods, kits, systems, etc. that utilize the deaminases and nucleobase editors.

[0122] In some embodiments, the nucleobase editors provided herein can be made by fusing together one or more protein domains, thereby generating a fusion protein. In certain embodiments, the fusion proteins provided herein comprise one or more features that improve the base editing activity (e.g., efficiency, selectivity, and specificity) of the fusion proteins. For example, the fusion proteins provided herein may comprise a Cas9 domain that has reduced nuclease activity. In some embodiments, the fusion proteins provided herein may have a Cas9 domain that does not have nuclease activity (dCas9), or a Cas9 domain that cuts one strand of a duplexed DNA molecule, referred to as a Cas9 nickase (nCas9). Without wishing to be bound by any particular theory, the presence of the catalytic residue (e.g., H840) maintains the activity of the Cas9 to cleave the non-edited (e.g., non-deaminated) strand containing a T opposite the targeted A. Mutation of the catalytic residue (e.g., D10 to A10) of Cas9 prevents cleavage of the edited strand containing the targeted A residue. Such Cas9 variants are able to generate a single-strand DNA break (nick) at a specific location based on the gRNA-defined target sequence, leading to repair of the non-edited strand, ultimately resulting in a T to C change on the non-edited strand.

### STAT3

[0123] The protein encoded by this gene is a member of the STAT protein family. In response to cytokines and growth factors, STAT family members are phosphorylated by the receptor associated kinases, and then form homo- or heterodimers that translocate to the cell nucleus where they act as transcription activators. This protein is activated through phosphorylation in response to various cytokines and growth factors including IFNs, EGF, IL5, IL6, HGF, LIF and BMP2. This protein mediates the expression of a variety of genes in response to cell stimuli, and thus plays a key role in many cellular processes such as cell growth and apoptosis. The small GTPase Rac1 has been shown to bind and regulate the activity of this protein. PIAS3 protein is a specific inhibitor of this protein.

[0124] STAT3 exists predominantly in two isoforms: STAT3α and STAT3β. STAT3 or STAT3α, is the full-length (770 amino acid; 92 kDa) protein, whereas STAT3β (83 kDa) is a truncated form generated by alternative splicing of exon 23. As a result, STAT3β lacks the 55-residue C-terminal transactivation domain of STAT3α, which is replaced with seven unique amino acids. Also, STAT3β comprises Y705, but lacks 5727. There are two other lesser-characterized isoforms of STAT3 as well: STAT3γ (72 kDa) and STAT3δ (64 kDa). The disclosure contemplates the following amino acid and nucleotide STAT3 sequences, and any sequences having at least 70%, 71%, 72%, 73%, 74%, 75%, 76%, 77%, 78%, 79%, 80%, 81%, 82%, 83%, 84%, 85%, 86%, 87%, 88%, 89%, 90%, 91%, 92%, 93%, 94%, 95%, 96%, 97%, 98%, 99%, or up to 100% sequence identity with any of the below sequences:

| | | SEQ |
|---|---|---|
| | | ID |
| Description | Sequence | NO: |
| signal transducer | MAQWNQLQQLDTRYLEQLHQLYSDSFPMELRQFLAPWIESQDWAYAASKESHATLVFH | 33 |
| and activator of | NLLGEIDQQYSRFLQESNVLYQHNLRRIKQFLQSRYLEKPMEIARIVARCLWEESRLL | |
| transcription 3 | QTAATAAQQGGQANHPTAAVVTEKQQMLEQHLQDVRKRVQDLEQKMKVVENLQDDFDF | |
| isoform 1 [Homo | NYKTLKSQGDMQDLNGNNQSVTRQKMQQLEQMLTALDQMRRSIVSELAGLLSAMEYVQ | |
| sapiens] | KTLTDEELADWKRRQQIACIGGPPNICLDRLENWITSLAESQLQTRQQIKKLEELQQK | |
| (NP_644805.1) | VSYKGDPIVQHRPMLEERIVELFRNLMKSAFVVERQPCMPMHPDRPLVIKTGVQFTTK | |
| 770AA | VRLLVKFPELNYQLKIKVCIDKDSGDVAALRGSRKFNILGTNTKVMNMEESNNGSLSA | |
| | EFKHLTLREQRCGNGGRANCDASLIVTEELHLITFETEVYHQGLKIDLETHSLPVVVI | |
| | SNICQMPNAWASILWYNMLTNNPKNVNFFTKPPIGTWDQVAEVLSWQFSSTTKRGLSI | |
| | EQLTTLAEKLLGPGVNYSGCQITWAKFCKENMAGKGFSFWVWLDNIIDLVKKYILALW | |
| | NEGYIMGFISKERERAILSTKPPGTFLLRFSESSKEGGVTFTWVEKDISGKTQIQSVE | |
| | PYTKQQLNNMSFAEIIMGYKIMDATNILVSPLVYLYPDIPKEEAFGKYCRPESQEHPE | |
| | ADPGSAAP [symbol] LKTKFICVTPTTCSNTIDLPM [symbol] PRTLDSLMQFGNNGEGAEPSAGGQFES | |
| | LTFDMELTSECATSPM | |
| | [symbol] 705 - in bold underline | |
| | [symbol] 727 - in bold underline | |
| Homo sapiens | GGTTTCCGGAGCTGCGGCGGCGCAGACTGGGAGGGGGAGCCGGGGGTTCCGACGTCG | 34 |
| signal transducer | CAGCCGAGGGAACAAGCCCCAACCGGATCCTGGACAGGCACCCCGGCTTGGCGCTGT | |
| and activator of | CTCTCCCCCTCGGCTCGGAGAGGCCCTTCGGCCTGAGGGAGCCTCGCCGCCCGTCCC | |
| transcription 3 | CGGCACACGCGCAGCCCCGGCCTCTCGGCCTCTGCCGGAGAAACAGTTGGGACCCCT | |
| (STAT3), | GATTTTAGCAGGATGGCCCAATGGAATCAGCTACAGCAGCTTGACACACGGTACCTG | |
| transcript | GAGCAGCTCCATCAGCTCTACAGTGACAGCTTCCCAATGGAGCTGCGGCAGTTTCTG | |
| variant 1 | GCCCCTTGGATTGAGAGTCAAGATTGGGCATATGCGGCCAGCAAAGAATCACATGCC | |
| (NM_139276.2) | ACTTTGGTGTTTCATAATCTCCTGGGAGAGATTGACCAGCAGTATAGCCGCTTCCTG | |
| | CAAGAGTCGAATGTTCTCTATCAGCACAATCTACGAAGAATCAAGCAGTTTCTTCAG | |
| | AGCAGGTATCTTGAGAAGCCAATGGAGATTGCCCGGATTGTGGCCCGGTGCCTGTGG | |
| | GAAGAATCACGCCTTCTACAGACTGCAGCCACTGCGGCCCAGCAAGGGGGCCAGGCC | |
| | AACCACCCCACAGCAGCCGTGGTGACGGAGAAGCAGCAGATGCTGGAGCAGCACCTT | |
| | CAGGATGTCCGGAAGAGAGTGCAGGATCTAGAACAGAAAATGAAAGTGGTAGAGAAT | |
| | CTCCAGGATGACTTTGATTTCAACTATAAAACCCTCAAGAGTCAAGGAGACATGCAA | |
| | GATCTGAATGGAAACAACCAGTCAGTGACCAGGCAGAAGATGCAGCAGCTGGAACAG | |
| | ATGCTCACTGCGCTGGACCAGATGCGGAGAAGCATCGTGAGTGAGCTGGCGGGGCTT | |
| | TTGTCAGCGATGGAGTACGTGCAGAAAACTCTCACGGACGAGGAGCTGGCTGACTGG | |
| | AAGAGGCGGCAACAGATTGCCTGCATTGGAGGCCCGCCCAACATCTGCCTAGATCGG | |
| | CTAGAAAACTGGATAACGTCATTAGCAGAATCTCAACTTCAGACCCGTCAACAAATT | |
| | AAGAAACTGGAGGAGTTGCAGCAAAAAGTTTCCTACAAAGGGGACCCCATTGTACAG | |
| | CACCGGCCGATGCTGGAGGAGAGAATCGTGGAGCTGTTTAGAAACTTAATGAAAAGT | |
| | GCCTTTGTGGTGGAGCGGCAGCCCTGCATGCCCATGCATCCTGACCGGCCCCTCGTC | |
| | ATCAAGACCGGCGTCCAGTTCACTACTAAAGTCAGGTTGCTGGTCAAATTCCCTGAG | |
| | TTGAATTATCAGCTTAAAATTAAAGTGTGCATTGACAAAGACTCTGGGGACGTTGCA | |
| | GCTCTCAGAGGATCCCGGAAATTTAACATTCTGGGCACAAACACAAAAGTGATGAAC | |
| | ATGGAAGAATCCAACAACGGCAGCCTCTCTGCAGAATTCAAACACTTGACCCTGAGG | |
| | GAGCAGAGATGTGGGAATGGGGGCCGAGCCAATTGTGATGCTTCCCTGATTGTGACT | |
| | GAGGAGCTGCACCTGATCACCTTTGAGACCGAGGTGTATCACCAAGGCCTCAAGATT | |
| | GACCTAGAGACCCACTCCTTGCCAGTTGTGGTGATCTCCAACATCTGTCAGATGCCA | |
| | AATGCCTGGGCGTCCATCCTGTGGTACAACATGCTGACCAACAATCCCAAGAATGTA | |
| | AACTTTTTTACCAAGCCCCCAATTGGAACCTGGGATCAAGTGGCCGAGGTCCTGAGC | |
| | TGGCAGTTCTCCTCCACCACCAAGCGAGGACTGAGCATCGAGCAGCTGACTACACTG | |
| | GCAGAGAAACTCTTGGGACCTGGTGTGAATTATTCAGGGTGTCAGATCACATGGGCT | |
| | AAATTTTGCAAAGAAAACATGGCTGGCAAGGGCTTCTCCTTCTGGGTCTGGCTGGAC | |
| | AATATCATTGACCTTGTGAAAAAGTACATCCTGGCCCTTTGGAACGAAGGGTACATC | |
| | ATGGGCTTTATCAGTAAGGAGCGGGAGCGGGCCATCTTGAGCACTAAGCCTCCAGGC | |
| | ACCTTCCTGCTAAGATTCAGTGAAAGCAGCAAAGAAGGAGGCGTCACTTTCACTTGG | |
| | GTGGAGAAGGACATCAGCGGTAAGACCCAGATCCAGTCCGTGGAACCATACACAAAG | |
| | CAGCAGCTGAACAACATGTCATTTGCTGAAATCATCATGGGCTATAAGATCATGGAT | |
| | GCTACCAATATCCTGGTGTCTCCACTGGTCTATCTCTATCCTGACATTCCCAAGGAG | |
| | GAGGCATTCGGAAAGTATTGTCGGCCAGAGAGCCAGGAGCATCCTGAAGCTGACCCA | |
| | GGTAGCGCTGCCCCATACCTGAAGACCAAGTTTATCTGTGTGACACCAACGACCTGC | |
| | AGCAATACCATTGACCTGCCGATGTCCCCCCGCACTTTAGATTCATTGATGCAGTTT | |
| | GGAAATAATGGTGAAGGTGCTGAACCCTCAGCAGGAGGGCAGTTTGAGTCCCTCACC | |
| | TTTGACATGGAGTTGACCTCGGAGTGCGCTACCTCCCCCATGTGAGGAGCTGAGAAC | |
| | GGAAGCTGCAGAAAGATACGACTGAGGCGCCTACCTGCATTCTGCCACCCCTCACAC | |
| | AGCCAAACCCCAGATCATCTGAAACTACTAACTTTGTGGTTCCAGATTTTTTTTAAT | |
| | CTCCTACTTCTGCTATCTTTGAGCAATCTGGGCACTTTTAAAAATAGAGAAATGAGT | |
| | GAATGTGGGTGATCTGCTTTTATCTAAATGCAAATAAGGATGTGTTCTCTGAGACCC | |
| | ATGATCAGGGGATGTGGCGGGGGGTGGCTAGAGGGAGAAAAAGGAAATGTCTTGTGT | |
| | TGTTTTGTTCCCCTGCCCTCCTTTCTCAGCAGCTTTTTGTTATTGTTGTTGTTGTTC | |
| | TTAGACAAGTGCCTCCTGGTGCCTGCGGCATCCTTCTGCCTGTTTCTGTAAGCAAAT | |
| | GCCACAGGCCACCTATAGCTACATACTCCTGGCATTGCACTTTTTAACCTTGCTGAC | |
| | ATCCAAATAGAAGATAGGACTATCTAAGCCCTAGGTTTCTTTTTAAATTAAGAAATA | |
| | ATAACAATTAAAGGGCAAAAAACACTGTATCAGCATAGCCTTTCTGTATTTAAGAAA | |
| | CTTAAGCAGCCGGGCATGGTGGCTCACGCCTGTAATCCCAGCACTTTGGGAGGCCGA | |
| | GGCGGATCATAAGGTCAGGAGATCAAGACCATCCTGGCTAACACGGTGAAACCCCGT | |
| | CTCTACTAAAAGTACAAAAAATTAGCTGGGTGTGGTGGTGGGCGCCTGTAGTCCCAG | |
| | CTACTCGGGAGGCTGAGGCAGGAGAATCGCTTGAACCTGAGAGGCGGAGGTTGCAGT | |
| | GAGCCAAAATTGCACCACTGCACACTGCACTCCATCCTGGGCGACAGTCTGAGACTC | |
| | TGTCTCAAAAAAAAAAAAAAAAAAAAGAAACTTCAGTTAACAGCCTCCTTGGTGCTT | |
| | TAAGCATTCAGCTTCCTTCAGGCTGGTAATTTATATAATCCCTGAAACGGGCTTCAG | |
| | GTCAAACCCTTAAGACATCTGAAGCTGCAACCTGGCCTTTGGTGTTGAAATAGGAAG | |
| | GTTTAAGGAGAATCTAAGCATTTTAGACTTTTTTTTATAAATAGACTTATTTTCCTT | |
| | TGTAATGTATTGGCCTTTTAGTGAGTAAGGCTGGGCAGAGGGTGCTTACAACCTTGA | |
| | CTCCCTTTCTCCCTGGACTTGATCTGCTGTTTCAGAGGCTAGGTTGTTTCTGTGGGT | |
| | GCCTTATCAGGGCTGGGATACTTCTGATTCTGGCTTCCTTCCTGCCCCACCCTCCCG | |
| | ACCCCAGTCCCCCTGATCCTGCTAGAGGCATGTCTCCTTGCGTGTCTAAAGGTCCCT | |
| | CATCCTGTTTGTTTTAGGAATCCTGGTCTCAGGACCTCATGGAAGAAGAGGGGGAGA | |
| | GAGTTACAGGTTGGACATGATGCACACTATGGGGCCCCAGCGACGTGTCTGGTTGAG | |
| | CTCAGGGAATATGGTTCTTAGCCAGTTTCTTGGTGATATCCAGTGGCACTTGTAATG | |
| | GCGTCTTCATTCAGTTCATGCAGGGCAAAGGCTTACTGATAAACTTGAGTCTGCCCT | |
| | CGTATGAGGGTGTATACCTGGCCTCCCTCTGAGGCTGGTGACTCCTCCCTGCTGGGG | |
| | CCCCACAGGTGAGGCAGAACAGCTAGAGGGCCTCCCCGCCTGCCCGCCTTGGCTGGC | |
| | TAGCTCGCCTCTCCTGTGCGTATGGGAACACCTAGCACGTGCTGGATGGGCTGCCTC | |
| | TGACTCAGAGGCATGGCCGGATTTGGCAACTCAAAACCACCTTGCCTCAGCTGATCA | |
| | GAGTTTCTGTGGAATTCTGTTTGTTAAATCAAATTAGCTGGTCTCTGAATTAAGGGG | |
| | GAGACGACCTTCTCTAAGATGAACAGGGTTCGCCCCAGTCCTCCTGCCTGGAGACAG | |
| | TTGATGTGTCATGCAGAGCTCTTACTTCTCCAGCAACACTCTTCAGTACATAATAAG | |
| | CTTAACTGATAAACAGAATATTTAGAAAGGTGAGACTTGGGCTTACCATTGGGTTTA | |
| | AATCATAGGGACCTAGGGCGAGGGTTCAGGGCTTCTCTGGAGCAGATATTGTCAAGT | |
| | TCATGGCCTTAGGTAGCATGTATCTGGTCTTAACTCTGATTGTAGCAAAAGTTCTGA | |
| | GAGGAGCTGAGCCCTGTTGTGGCCCATTAAAGAACAGGGTCCTCAGGCCCTGCCCGC | |
| | TTCCTGTCCACTGCCCCCTCCCCATCCCCAGCCCAGCCGAGGGAATCCCGTGGGTTG | |
| | CTTACCTACCTATAAGGTGGTTTATAAGCTGCTGTCCTGGCCACTGCATTCAAATTC | |
| | CAATGTGTACTTCATAGTGTAAAAATTTATATTATTGTGAGGTTTTTTGTCTTTTTT | |
| | TTTTTTTTTTTTTTTTGGTATATTGCTGTATCTACTTTAACTTCCAGAAATAAACGT | |
| | TATATAGGAACCGTAAAAA | |
| signal transducer | MAQWNQLQQLDTRYLEQLHQLYSDSFPMELRQFLAPWIESQDWAYAASKESHATLVF | 35 |
| and activator of | HNLLGEIDQQYSRFLQESNVLYQHNLRRIKQFLQSRYLEKPMEIARIVARCLWEESR | |
| transcription 3 | LLQTAATAAQQGGQANHPTAAVVTEKQQMLEQHLQDVRKRVQDLEQKMKVVENLQDD | |
| isoform 2 [Homo | FDFNYKTLKSQGDMQDLNGNNQSVTRQKMQQLEQMLTALDQMRRSIVSELAGLLSAM | |
| sapiens] | EYVQKTLTDEELADWKRRQQIACIGGPPNICLDRLENWITSLAESQLQTRQQIKKLE | |
| (NP_003141.2) | ELQQKVSYKGDPIVQHRPMLEERIVELFRNLMKSAFVVERQPCMPMHPDRPLVIKTG | |
| | VQFTTKVRLLVKFPELNYQLKIKVCIDKDSGDVAALRGSRKFNILGTNTKVMNMEES | |
| | NNGSLSAEFKHLTLREQRCGNGGRANCDASLIVTEELHLITFETEVYHQGLKIDLET | |
| | HSLPVVVISNICQMPNAWASILWYNMLTNNPKNVNFFTKPPIGTWDQVAEVLSWQFS | |
| | STTKRGLSIEQLTTLAEKLLGPGVNYSGCQITWAKFCKENMAGKGFSFWVWLDNIID | |
| | LVKKYILALWNEGYIMGFISKERERAILSTKPPGTFLLRFSESSKEGGVTFTWVEKD | |
| | ISGKTQIQSVEPYTKQQLNNMSFAEIIMGYKIMDATNILVSPLVYLYPDIPKEEAFG | |
| | KYCRPESQEHPEADPGAAPYLKTKFICVTPTTCSNTIDLPMSPRTLDSLMQFGNNGE | |
| | GAEPSAGGQFESLTFDMELTSECATSPM | |
| Homo sapiens | GTCGCAGCCGAGGGAACAAGCCCCAACCGGATCCTGGACAGGCACCCCGGCTTGGCG | 36 |
| signal transducer | CTGTCTCTCCCCCTCGGCTCGGAGAGGCCCTTCGGCCTGAGGGAGCCTCGCCGCCCG | |
| and activator of | TCCCCGGCACACGCGCAGCCCCGGCCTCTCGGCCTCTGCCGGAGAAACAGGATGGCC | |
| transcription 3 | CAATGGAATCAGCTACAGCAGCTTGACACACGGTACCTGGAGCAGCTCCATCAGCTC | |
| (STAT3), | TACAGTGACAGCTTCCCAATGGAGCTGCGGCAGTTTCTGGCCCCTTGGATTGAGAGT | |
| transcript | CAAGATTGGGCATATGCGGCCAGCAAAGAATCACATGCCACTTTGGTGTTTCATAAT | |
| variant 2 | CTCCTGGGAGAGATTGACCAGCAGTATAGCCGCTTCCTGCAAGAGTCGAATGTTCTC | |
| (NM_003150.4) | TATCAGCACAATCTACGAAGAATCAAGCAGTTTCTTCAGAGCAGGTATCTTGAGAAG | |
| | CCAATGGAGATTGCCCGGATTGTGGCCCGGTGCCTGTGGGAAGAATCACGCCTTCTA | |
| | CAGACTGCAGCCACTGCGGCCCAGCAAGGGGGCCAGGCCAACCACCCCACAGCAGCC | |
| | GTGGTGACGGAGAAGCAGCAGATGCTGGAGCAGCACCTTCAGGATGTCCGGAAGAGA | |
| | GTGCAGGATCTAGAACAGAAAATGAAAGTGGTAGAGAATCTCCAGGATGACTTTGAT | |
| | TTCAACTATAAAACCCTCAAGAGTCAAGGAGACATGCAAGATCTGAATGGAAACAAC | |
| | CAGTCAGTGACCAGGCAGAAGATGCAGCAGCTGGAACAGATGCTCACTGCGCTGGAC | |
| | CAGATGCGGAGAAGCATCGTGAGTGAGCTGGCGGGGCTTTTGTCAGCGATGGAGTAC | |
| | GTGCAGAAAACTCTCACGGACGAGGAGCTGGCTGACTGGAAGAGGCGGCAACAGATT | |
| | GCCTGCATTGGAGGCCCGCCCAACATCTGCCTAGATCGGCTAGAAAACTGGATAACG | |
| | TCATTAGCAGAATCTCAACTTCAGACCCGTCAACAAATTAAGAAACTGGAGGAGTTG | |
| | CAGCAAAAAGTTTCCTACAAAGGGGACCCCATTGTACAGCACCGGCCGATGCTGGAG | |
| | GAGAGAATCGTGGAGCTGTTTAGAAACTTAATGAAAAGTGCCTTTGTGGTGGAGCGG | |
| | CAGCCCTGCATGCCCATGCATCCTGACCGGCCCCTCGTCATCAAGACCGGCGTCCAG | |
| | TTCACTACTAAAGTCAGGTTGCTGGTCAAATTCCCTGAGTTGAATTATCAGCTTAAA | |
| | ATTAAAGTGTGCATTGACAAAGACTCTGGGGACGTTGCAGCTCTCAGAGGATCCCGG | |
| | AAATTTAACATTCTGGGCACAAACACAAAAGTGATGAACATGGAAGAATCCAACAAC | |
| | GGCAGCCTCTCTGCAGAATTCAAACACTTGACCCTGAGGGAGCAGAGATGTGGGAAT | |
| | GGGGGCCGAGCCAATTGTGATGCTTCCCTGATTGTGACTGAGGAGCTGCACCTGATC | |
| | ACCTTTGAGACCGAGGTGTATCACCAAGGCCTCAAGATTGACCTAGAGACCCACTCC | |
| | TTGCCAGTTGTGGTGATCTCCAACATCTGTCAGATGCCAAATGCCTGGGCGTCCATC | |
| | CTGTGGTACAACATGCTGACCAACAATCCCAAGAATGTAAACTTTTTTACCAAGCCC | |
| | CCAATTGGAACCTGGGATCAAGTGGCCGAGGTCCTGAGCTGGCAGTTCTCCTCCACC | |
| | ACCAAGCGAGGACTGAGCATCGAGCAGCTGACTACACTGGCAGAGAAACTCTTGGGA | |
| | CCTGGTGTGAATTATTCAGGGTGTCAGATCACATGGGCTAAATTTTGCAAAGAAAAC | |
| | ATGGCTGGCAAGGGCTTCTCCTTCTGGGTCTGGCTGGACAATATCATTGACCTTGTG | |
| | AAAAAGTACATCCTGGCCCTTTGGAACGAAGGGTACATCATGGGCTTTATCAGTAAG | |
| | GAGCGGGAGCGGGCCATCTTGAGCACTAAGCCTCCAGGCACCTTCCTGCTAAGATTC | |
| | AGTGAAAGCAGCAAAGAAGGAGGCGTCACTTTCACTTGGGTGGAGAAGGACATCAGC | |
| | GGTAAGACCCAGATCCAGTCCGTGGAACCATACACAAAGCAGCAGCTGAACAACATG | |
| | TCATTTGCTGAAATCATCATGGGCTATAAGATCATGGATGCTACCAATATCCTGGTG | |
| | TCTCCACTGGTCTATCTCTATCCTGACATTCCCAAGGAGGAGGCATTCGGAAAGTAT | |
| | TGTCGGCCAGAGAGCCAGGAGCATCCTGAAGCTGACCCAGGCGCTGCCCCATACCTG | |
| | AAGACCAAGTTTATCTGTGTGACACCAACGACCTGCAGCAATACCATTGACCTGCCG | |
| | ATGTCCCCCCGCACTTTAGATTCATTGATGCAGTTTGGAAATAATGGTGAAGGTGCT | |
| | GAACCCTCAGCAGGAGGGCAGTTTGAGTCCCTCACCTTTGACATGGAGTTGACCTCG | |
| | GAGTGCGCTACCTCCCCCATGTGAGGAGCTGAGAACGGAAGCTGCAGAAAGATACGA | |
| | CTGAGGCGCCTACCTGCATTCTGCCACCCCTCACACAGCCAAACCCCAGATCATCTG | |
| | AAACTACTAACTTTGTGGTTCCAGATTTTTTTTAATCTCCTACTTCTGCTATCTTTG | |
| | AGCAATCTGGGCACTTTTAAAAATAGAGAAATGAGTGAATGTGGGTGATCTGCTTTT | |
| | ATCTAAATGCAAATAAGGATGTGTTCTCTGAGACCCATGATCAGGGGATGTGGCGGG | |
| | GGGTGGCTAGAGGGAGAAAAAGGAAATGTCTTGTGTTGTTTTGTTCCCCTGCCCTCC | |
| | TTTCTCAGCAGCTTTTTGTTATTGTTGTTGTTGTTCTTAGACAAGTGCCTCCTGGTG | |
| | CCTGCGGCATCCTTCTGCCTGTTTCTGTAAGCAAATGCCACAGGCCACCTATAGCTA | |
| | CATACTCCTGGCATTGCACTTTTTAACCTTGCTGACATCCAAATAGAAGATAGGACT | |
| | ATCTAAGCCCTAGGTTTCTTTTTAAATTAAGAAATAATAACAATTAAAGGGCAAAAA | |
| | ACACTGTATCAGCATAGCCTTTCTGTATTTAAGAAACTTAAGCAGCCGGGCATGGTG | |
| | GCTCACGCCTGTAATCCCAGCACTTTGGGAGGCCGAGGCGGATCATAAGGTCAGGAG | |
| | ATCAAGACCATCCTGGCTAACACGGTGAAACCCCGTCTCTACTAAAAGTACAAAAAA | |
| | TTAGCTGGGTGTGGTGGTGGGCGCCTGTAGTCCCAGCTACTCGGGAGGCTGAGGCAG | |
| | GAGAATCGCTTGAACCTGAGAGGCGGAGGTTGCAGTGAGCCAAAATTGCACCACTGC | |
| | ACACTGCACTCCATCCTGGGCGACAGTCTGAGACTCTGTCTCAAAAAAAAAAAAAAA | |
| | AAAAAGAAACTTCAGTTAACAGCCTCCTTGGTGCTTTAAGCATTCAGCTTCCTTCAG | |
| | GCTGGTAATTTATATAATCCCTGAAACGGGCTTCAGGTCAAACCCTTAAGACATCTG | |
| | AAGCTGCAACCTGGCCTTTGGTGTTGAAATAGGAAGGTTTAAGGAGAATCTAAGCAT | |
| | TTTAGACTTTTTTTTATAAATAGACTTATTTTCCTTTGTAATGTATTGGCCTTTTAG | |
| | TGAGTAAGGCTGGGCAGAGGGTGCTTACAACCTTGACTCCCTTTCTCCCTGGACTTG | |
| | ATCTGCTGTTTCAGAGGCTAGGTTGTTTCTGTGGGTGCCTTATCAGGGCTGGGATAC | |
| | TTCTGATTCTGGCTTCCTTCCTGCCCCACCCTCCCGACCCCAGTCCCCCTGATCCTG | |
| | CTAGAGGCATGTCTCCTTGCGTGTCTAAAGGTCCCTCATCCTGTTTGTTTTAGGAAT | |
| | CCTGGTCTCAGGACCTCATGGAAGAAGAGGGGGAGAGAGTTACAGGTTGGACATGAT | |
| | GCACACTATGGGGCCCCAGCGACGTGTCTGGTTGAGCTCAGGGAATATGGTTCTTAG | |
| | CCAGTTTCTTGGTGATATCCAGTGGCACTTGTAATGGCGTCTTCATTCAGTTCATGC | |
| | AGGGCAAAGGCTTACTGATAAACTTGAGTCTGCCCTCGTATGAGGGTGTATACCTGG | |
| | CCTCCCTCTGAGGCTGGTGACTCCTCCCTGCTGGGGCCCCACAGGTGAGGCAGAACA | |
| | GCTAGAGGGCCTCCCCGCCTGCCCGCCTTGGCTGGCTAGCTCGCCTCTCCTGTGCGT | |
| | ATGGGAACACCTAGCACGTGCTGGATGGGCTGCCTCTGACTCAGAGGCATGGCCGGA | |
| | TTTGGCAACTCAAAACCACCTTGCCTCAGCTGATCAGAGTTTCTGTGGAATTCTGTT | |
| | TGTTAAATCAAATTAGCTGGTCTCTGAATTAAGGGGGAGACGACCTTCTCTAAGATG | |
| | AACAGGGTTCGCCCCAGTCCTCCTGCCTGGAGACAGTTGATGTGTCATGCAGAGCTC | |
| | TTACTTCTCCAGCAACACTCTTCAGTACATAATAAGCTTAACTGATAAACAGAATAT | |
| | TTAGAAAGGTGAGACTTGGGCTTACCATTGGGTTTAAATCATAGGGACCTAGGGCGA | |
| | GGGTTCAGGGCTTCTCTGGAGCAGATATTGTCAAGTTCATGGCCTTAGGTAGCATGT | |
| | ATCTGGTCTTAACTCTGATTGTAGCAAAAGTTCTGAGAGGAGCTGAGCCCTGTTGTG | |
| | GCCCATTAAAGAACAGGGTCCTCAGGCCCTGCCCGCTTCCTGTCCACTGCCCCCTCC | |
| | CCATCCCCAGCCCAGCCGAGGGAATCCCGTGGGTTGCTTACCTACCTATAAGGTGGT | |
| | TTATAAGCTGCTGTCCTGGCCACTGCATTCAAATTCCAATGTGTACTTCATAGTGTA | |
| | AAAATTTATATTATTGTGAGGTTTTTTGTCTTTTTTTTTTTTTTTTTTTTTTGGTAT | |
| | ATTGCTGTATCTACTTTAACTTCCAGAAATAAACGTTATATAGGAACCGTC | |
| signal transducer | MAQWNQLQQLDTRYLEQLHQLYSDSFPMELRQFLAPWIESQDWAYAASKESHATLVF | 37 |
| and activator of | HNLLGEIDQQYSRFLQESNVLYQHNLRRIKQFLQSRYLEKPMEIARIVARCLWEESR | |
| transcription 3 | LLQTAATAAQQGGQANHPTAAVVTEKQQMLEQHLQDVRKRVQDLEQKMKVVENLQDD | |
| isoform 3 [Homo | FDFNYKTLKSQGDMQDLNGNNQSVTRQKMQQLEQMLTALDQMRRSIVSELAGLLSAM | |
| sapiens] | EYVQKTLTDEELADWKRRQQIACIGGPPNICLDRLENWITSLAESQLQTRQQIKKLE | |
| (NP_998827.1) | ELQQKVSYKGDPIVQHRPMLEERIVELFRNLMKSAFVVERQPCMPMHPDRPLVIKTG | |
| | VQFTTKVRLLVKFPELNYQLKIKVCIDKDSGDVAALRGSRKFNILGTNTKVMNMEES | |
| | NNGSLSAEFKHLTLREQRCGNGGRANCDASLIVTEELHLITFETEVYHQGLKIDLET | |
| | HSLPVVVISNICQMPNAWASILWYNMLTNNPKNVNFFTKPPIGTWDQVAEVLSWQFS | |
| | STTKRGLSIEQLTTLAEKLLGPGVNYSGCQITWAKFCKENMAGKGFSFWVWLDNIID | |
| | LVKKYILALWNEGYIMGFISKERERAILSTKPPGTFLLRFSESSKEGGVTFTWVEKD | |
| | ISGKTQIQSVEPYTKQQLNNMSFAEIIMGYKIMDATNILVSPLVYLYPDIPKEEAFG | |
| | KYCRPESQEHPEADPGSAAPYLKTKFICVTPFIDAVWK | |
| Homo sapiens | GTCGCAGCCGAGGGAACAAGCCCCAACCGGATCCTGGACAGGCACCCCGGCTTGGCG | 38 |
| signal transducer | CTGTCTCTCCCCCTCGGCTCGGAGAGGCCCTTCGGCCTGAGGGAGCCTCGCCGCCCG | |
| and activator of | TCCCCGGCACACGCGCAGCCCCGGCCTCTCGGCCTCTGCCGGAGAAACAGTTGGGAC | |
| transcription 3 | CCCTGATTTTAGCAGGATGGCCCAATGGAATCAGCTACAGCAGCTTGACACACGGTA | |
| (STAT3), | CCTGGAGCAGCTCCATCAGCTCTACAGTGACAGCTTCCCAATGGAGCTGCGGCAGTT | |
| transcript | TCTGGCCCCTTGGATTGAGAGTCAAGATTGGGCATATGCGGCCAGCAAAGAATCACA | |
| variant 3 | TGCCACTTTGGTGTTTCATAATCTCCTGGGAGAGATTGACCAGCAGTATAGCCGCTT | |
| (NM_213662.2) | CCTGCAAGAGTCGAATGTTCTCTATCAGCACAATCTACGAAGAATCAAGCAGTTTCT | |
| | TCAGAGCAGGTATCTTGAGAAGCCAATGGAGATTGCCCGGATTGTGGCCCGGTGCCT | |
| | GTGGGAAGAATCACGCCTTCTACAGACTGCAGCCACTGCGGCCCAGCAAGGGGGCCA | |
| | GGCCAACCACCCCACAGCAGCCGTGGTGACGGAGAAGCAGCAGATGCTGGAGCAGCA | |
| | CCTTCAGGATGTCCGGAAGAGAGTGCAGGATCTAGAACAGAAAATGAAAGTGGTAGA | |
| | GAATCTCCAGGATGACTTTGATTTCAACTATAAAACCCTCAAGAGTCAAGGAGACAT | |
| | GCAAGATCTGAATGGAAACAACCAGTCAGTGACCAGGCAGAAGATGCAGCAGCTGGA | |
| | ACAGATGCTCACTGCGCTGGACCAGATGCGGAGAAGCATCGTGAGTGAGCTGGCGGG | |
| | GCTTTTGTCAGCGATGGAGTACGTGCAGAAAACTCTCACGGACGAGGAGCTGGCTGA | |
| | CTGGAAGAGGCGGCAACAGATTGCCTGCATTGGAGGCCCGCCCAACATCTGCCTAGA | |
| | TCGGCTAGAAAACTGGATAACGTCATTAGCAGAATCTCAACTTCAGACCCGTCAACA | |
| | AATTAAGAAACTGGAGGAGTTGCAGCAAAAAGTTTCCTACAAAGGGGACCCCATTGT | |
| | ACAGCACCGGCCGATGCTGGAGGAGAGAATCGTGGAGCTGTTTAGAAACTTAATGAA | |
| | AAGTGCCTTTGTGGTGGAGCGGCAGCCCTGCATGCCCATGCATCCTGACCGGCCCCT | |
| | CGTCATCAAGACCGGCGTCCAGTTCACTACTAAAGTCAGGTTGCTGGTCAAATTCCC | |
| | TGAGTTGAATTATCAGCTTAAAATTAAAGTGTGCATTGACAAAGACTCTGGGGACGT | |
| | TGCAGCTCTCAGAGGATCCCGGAAATTTAACATTCTGGGCACAAACACAAAAGTGAT | |
| | GAACATGGAAGAATCCAACAACGGCAGCCTCTCTGCAGAATTCAAACACTTGACCCT | |
| | GAGGGAGCAGAGATGTGGGAATGGGGGCCGAGCCAATTGTGATGCTTCCCTGATTGT | |
| | GACTGAGGAGCTGCACCTGATCACCTTTGAGACCGAGGTGTATCACCAAGGCCTCAA | |
| | GATTGACCTAGAGACCCACTCCTTGCCAGTTGTGGTGATCTCCAACATCTGTCAGAT | |
| | GCCAAATGCCTGGGCGTCCATCCTGTGGTACAACATGCTGACCAACAATCCCAAGAA | |
| | TGTAAACTTTTTTACCAAGCCCCCAATTGGAACCTGGGATCAAGTGGCCGAGGTCCT | |
| | GAGCTGGCAGTTCTCCTCCACCACCAAGCGAGGACTGAGCATCGAGCAGCTGACTAC | |
| | ACTGGCAGAGAAACTCTTGGGACCTGGTGTGAATTATTCAGGGTGTCAGATCACATG | |
| | GGCTAAATTTTGCAAAGAAAACATGGCTGGCAAGGGCTTCTCCTTCTGGGTCTGGCT | |
| | GGACAATATCATTGACCTTGTGAAAAAGTACATCCTGGCCCTTTGGAACGAAGGGTA | |
| | CATCATGGGCTTTATCAGTAAGGAGCGGGAGCGGGCCATCTTGAGCACTAAGCCTCC | |
| | AGGCACCTTCCTGCTAAGATTCAGTGAAAGCAGCAAAGAAGGAGGCGTCACTTTCAC | |
| | TTGGGTGGAGAAGGACATCAGCGGTAAGACCCAGATCCAGTCCGTGGAACCATACAC | |
| | AAAGCAGCAGCTGAACAACATGTCATTTGCTGAAATCATCATGGGCTATAAGATCAT | |
| | GGATGCTACCAATATCCTGGTGTCTCCACTGGTCTATCTCTATCCTGACATTCCCAA | |
| | GGAGGAGGCATTCGGAAAGTATTGTCGGCCAGAGAGCCAGGAGCATCCTGAAGCTGA | |
| | CCCAGGTAGCGCTGCCCCATACCTGAAGACCAAGTTTATCTGTGTGACACCATTCAT | |
| | TGATGCAGTTTGGAAATAATGGTGAAGGTGCTGAACCCTCAGCAGGAGGGCAGTTTG | |
| | AGTCCCTCACCTTTGACATGGAGTTGACCTCGGAGTGCGCTACCTCCCCCATGTGAG | |
| | GAGCTGAGAACGGAAGCTGCAGAAAGATACGACTGAGGCGCCTACCTGCATTCTGCC | |
| | ACCCCTCACACAGCCAAACCCCAGATCATCTGAAACTACTAACTTTGTGGTTCCAGA | |
| | TTTTTTTTAATCTCCTACTTCTGCTATCTTTGAGCAATCTGGGCACTTTTAAAAATA | |
| | GAGAAATGAGTGAATGTGGGTGATCTGCTTTTATCTAAATGCAAATAAGGATGTGTT | |
| | CTCTGAGACCCATGATCAGGGGATGTGGCGGGGGGTGGCTAGAGGGAGAAAAAGGAA | |
| | ATGTCTTGTGTTGTTTTGTTCCCCTGCCCTCCTTTCTCAGCAGCTTTTTGTTATTGT | |
| | TGTTGTTGTTCTTAGACAAGTGCCTCCTGGTGCCTGCGGCATCCTTCTGCCTGTTTC | |
| | TGTAAGCAAATGCCACAGGCCACCTATAGCTACATACTCCTGGCATTGCACTTTTTA | |
| | ACCTTGCTGACATCCAAATAGAAGATAGGACTATCTAAGCCCTAGGTTTCTTTTTAA | |
| | ATTAAGAAATAATAACAATTAAAGGGCAAAAAACACTGTATCAGCATAGCCTTTCTG | |
| | TATTTAAGAAACTTAAGCAGCCGGGCATGGTGGCTCACGCCTGTAATCCCAGCACTT | |
| | TGGGAGGCCGAGGCGGATCATAAGGTCAGGAGATCAAGACCATCCTGGCTAACACGG | |
| | TGAAACCCCGTCTCTACTAAAAGTACAAAAAATTAGCTGGGTGTGGTGGTGGGCGCC | |
| | TGTAGTCCCAGCTACTCGGGAGGCTGAGGCAGGAGAATCGCTTGAACCTGAGAGGCG | |
| | GAGGTTGCAGTGAGCCAAAATTGCACCACTGCACACTGCACTCCATCCTGGGCGACA | |
| | GTCTGAGACTCTGTCTCAAAAAAAAAAAAAAAAAAAAGAAACTTCAGTTAACAGCCT | |
| | CCTTGGTGCTTTAAGCATTCAGCTTCCTTCAGGCTGGTAATTTATATAATCCCTGAA | |
| | ACGGGCTTCAGGTCAAACCCTTAAGACATCTGAAGCTGCAACCTGGCCTTTGGTGTT | |
| | GAAATAGGAAGGTTTAAGGAGAATCTAAGCATTTTAGACTTTTTTTTATAAATAGAC | |
| | TTATTTTCCTTTGTAATGTATTGGCCTTTTAGTGAGTAAGGCTGGGCAGAGGGTGCT | |
| | TACAACCTTGACTCCCTTTCTCCCTGGACTTGATCTGCTGTTTCAGAGGCTAGGTTG | |
| | TTTCTGTGGGTGCCTTATCAGGGCTGGGATACTTCTGATTCTGGCTTCCTTCCTGCC | |
| | CCACCCTCCCGACCCCAGTCCCCCTGATCCTGCTAGAGGCATGTCTCCTTGCGTGTC | |
| | TAAAGGTCCCTCATCCTGTTTGTTTTAGGAATCCTGGTCTCAGGACCTCATGGAAGA | |
| | AGAGGGGGAGAGAGTTACAGGTTGGACATGATGCACACTATGGGGCCCCAGCGACGT | |
| | GTCTGGTTGAGCTCAGGGAATATGGTTCTTAGCCAGTTTCTTGGTGATATCCAGTGG | |
| | CACTTGTAATGGCGTCTTCATTCAGTTCATGCAGGGCAAAGGCTTACTGATAAACTT | |
| | GAGTCTGCCCTCGTATGAGGGTGTATACCTGGCCTCCCTCTGAGGCTGGTGACTCCT | |
| | CCCTGCTGGGGCCCCACAGGTGAGGCAGAACAGCTAGAGGGCCTCCCCGCCTGCCCG | |
| | CCTTGGCTGGCTAGCTCGCCTCTCCTGTGCGTATGGGAACACCTAGCACGTGCTGGA | |
| | TGGGCTGCCTCTGACTCAGAGGCATGGCCGGATTTGGCAACTCAAAACCACCTTGCC | |
| | TCAGCTGATCAGAGTTTCTGTGGAATTCTGTTTGTTAAATCAAATTAGCTGGTCTCT | |
| | GAATTAAGGGGGAGACGACCTTCTCTAAGATGAACAGGGTTCGCCCCAGTCCTCCTG | |
| | CCTGGAGACAGTTGATGTGTCATGCAGAGCTCTTACTTCTCCAGCAACACTCTTCAG | |
| | TACATAATAAGCTTAACTGATAAACAGAATATTTAGAAAGGTGAGACTTGGGCTTAC | |
| | CATTGGGTTTAAATCATAGGGACCTAGGGCGAGGGTTCAGGGCTTCTCTGGAGCAGA | |
| | TATTGTCAAGTTCATGGCCTTAGGTAGCATGTATCTGGTCTTAACTCTGATTGTAGC | |
| | AAAAGTTCTGAGAGGAGCTGAGCCCTGTTGTGGCCCATTAAAGAACAGGGTCCTCAG | |
| | GCCCTGCCCGCTTCCTGTCCACTGCCCCCTCCCCATCCCCAGCCCAGCCGAGGGAAT | |
| | CCCGTGGGTTGCTTACCTACCTATAAGGTGGTTTATAAGCTGCTGTCCTGGCCACTG | |
| | CATTCAAATTCCAATGTGTACTTCATAGTGTAAAAATTTATATTATTGTGAGGTTTT | |
| | TTGTCTTTTTTTTTTTTTTTTTTTTTTGGTATATTGCTGTATCTACTTTAACTTCCA | |
| | GAAATAAACGTTATATAGGAACCGTC | |
| signal transducer | MAQWNQLQQLDTRYLEQLHQLYSDSFPMELRQFLAPWIESQDWAYAASKESHATLVF | 39 |
| and activator of | HNLLGEIDQQYSRFLQESNVLYQHNLRRIKQFLQSRYLEKPMEIARIVARCLWEESR | |
| transcription 3 | LLQTAATAAQQGGQANHPTAAVVTEKQQMLEQHLQDVRKRVQDLEQKMKVVENLQDD | |
| isoform 4 [Homo | FDFNYKTLKSQGDMQDLNGNNQSVTRQKMQQLEQMLTALDQMRRSIVSELAGLLSAM | |
| sapiens] | EYVQKTLTDEELADWKRRQQIACIGGPPNICLDRLENWITSLAESQLQTRQQIKKLE | |
| (NP_001356448.1) | ELQQKVSYKGDPIVQHRPMLEERIVELFRNLMKSAFVVERQPCMPMHPDRPLVIKTG | |
| | VQFTTKVRLLVKFPELNYQLKIKVCIDKDSGDVAALRGSRKFNILGTNTKVMNMEES | |
| | NNGSLSAEFKHLTLREQRCGNGGRANCDASLIVTEELHLITFETEVYHQGLKIDLET | |
| | HSLPVVVISNICQMPNAWASILWYNMLTNNPKNVNFFTKPPIGTWDQVAEVLSWQFS | |
| | STTKRGLSIEQLTTLAEKLLGPGVNYSGCQITWAKFCKENMAGKGFSFWVWLDNIID | |
| | LVKKYILALWNEGYIMGFISKERERAILSTKPPGTFLLRFSESSKEGGVTFTWVEKD | |
| | ISGKTQIQSVEPYTKQQLNNMSFAEIIMGYKIMDATNILVSPLVYLYPDIPKEEAFG | |
| | KYCRPESQEHPEADPGAAPYLKTKFICVTPFIDAVWK | |
| Homo sapiens | GTCGCAGCCGAGGGAACAAGCCCCAACCGGATCCTGGACAGGCACCCCGGCTTGGCG | 40 |
| signal transducer | CTGTCTCTCCCCCTCGGCTCGGAGAGGCCCTTCGGCCTGAGGGAGCCTCGCCGCCCG | |
| and activator of | TCCCCGGCACACGCGCAGCCCCGGCCTCTCGGCCTCTGCCGGAGAAACAGGATGGCC | |
| transcription 3 | CAATGGAATCAGCTACAGCAGCTTGACACACGGTACCTGGAGCAGCTCCATCAGCTC | |
| (STAT3), | TACAGTGACAGCTTCCCAATGGAGCTGCGGCAGTTTCTGGCCCCTTGGATTGAGAGT | |
| transcript | CAAGATTGGGCATATGCGGCCAGCAAAGAATCACATGCCACTTTGGTGTTTCATAAT | |
| variant 10 | CTCCTGGGAGAGATTGACCAGCAGTATAGCCGCTTCCTGCAAGAGTCGAATGTTCTC | |
| (NM_001369519.1) | TATCAGCACAATCTACGAAGAATCAAGCAGTTTCTTCAGAGCAGGTATCTTGAGAAG | |
| | CCAATGGAGATTGCCCGGATTGTGGCCCGGTGCCTGTGGGAAGAATCACGCCTTCTA | |
| | CAGACTGCAGCCACTGCGGCCCAGCAAGGGGGCCAGGCCAACCACCCCACAGCAGCC | |
| | GTGGTGACGGAGAAGCAGCAGATGCTGGAGCAGCACCTTCAGGATGTCCGGAAGAGA | |
| | GTGCAGGATCTAGAACAGAAAATGAAAGTGGTAGAGAATCTCCAGGATGACTTTGAT | |
| | TTCAACTATAAAACCCTCAAGAGTCAAGGAGACATGCAAGATCTGAATGGAAACAAC | |
| | CAGTCAGTGACCAGGCAGAAGATGCAGCAGCTGGAACAGATGCTCACTGCGCTGGAC | |
| | CAGATGCGGAGAAGCATCGTGAGTGAGCTGGCGGGGCTTTTGTCAGCGATGGAGTAC | |
| | GTGCAGAAAACTCTCACGGACGAGGAGCTGGCTGACTGGAAGAGGCGGCAACAGATT | |
| | GCCTGCATTGGAGGCCCGCCCAACATCTGCCTAGATCGGCTAGAAAACTGGATAACG | |
| | TCATTAGCAGAATCTCAACTTCAGACCCGTCAACAAATTAAGAAACTGGAGGAGTTG | |
| | CAGCAAAAAGTTTCCTACAAAGGGGACCCCATTGTACAGCACCGGCCGATGCTGGAG | |
| | GAGAGAATCGTGGAGCTGTTTAGAAACTTAATGAAAAGTGCCTTTGTGGTGGAGCGG | |
| | CAGCCCTGCATGCCCATGCATCCTGACCGGCCCCTCGTCATCAAGACCGGCGTCCAG | |
| | TTCACTACTAAAGTCAGGTTGCTGGTCAAATTCCCTGAGTTGAATTATCAGCTTAAA | |
| | ATTAAAGTGTGCATTGACAAAGACTCTGGGGACGTTGCAGCTCTCAGAGGATCCCGG | |
| | AAATTTAACATTCTGGGCACAAACACAAAAGTGATGAACATGGAAGAATCCAACAAC | |
| | GGCAGCCTCTCTGCAGAATTCAAACACTTGACCCTGAGGGAGCAGAGATGTGGGAAT | |
| | GGGGGCCGAGCCAATTGTGATGCTTCCCTGATTGTGACTGAGGAGCTGCACCTGATC | |
| | ACCTTTGAGACCGAGGTGTATCACCAAGGCCTCAAGATTGACCTAGAGACCCACTCC | |
| | TTGCCAGTTGTGGTGATCTCCAACATCTGTCAGATGCCAAATGCCTGGGCGTCCATC | |
| | CTGTGGTACAACATGCTGACCAACAATCCCAAGAATGTAAACTTTTTTACCAAGCCC | |
| | CCAATTGGAACCTGGGATCAAGTGGCCGAGGTCCTGAGCTGGCAGTTCTCCTCCACC | |
| | ACCAAGCGAGGACTGAGCATCGAGCAGCTGACTACACTGGCAGAGAAACTCTTGGGA | |
| | CCTGGTGTGAATTATTCAGGGTGTCAGATCACATGGGCTAAATTTTGCAAAGAAAAC | |
| | ATGGCTGGCAAGGGCTTCTCCTTCTGGGTCTGGCTGGACAATATCATTGACCTTGTG | |
| | AAAAAGTACATCCTGGCCCTTTGGAACGAAGGGTACATCATGGGCTTTATCAGTAAG | |
| | GAGCGGGAGCGGGCCATCTTGAGCACTAAGCCTCCAGGCACCTTCCTGCTAAGATTC | |
| | AGTGAAAGCAGCAAAGAAGGAGGCGTCACTTTCACTTGGGTGGAGAAGGACATCAGC | |
| | GGTAAGACCCAGATCCAGTCCGTGGAACCATACACAAAGCAGCAGCTGAACAACATG | |
| | TCATTTGCTGAAATCATCATGGGCTATAAGATCATGGATGCTACCAATATCCTGGTG | |
| | TCTCCACTGGTCTATCTCTATCCTGACATTCCCAAGGAGGAGGCATTCGGAAAGTAT | |
| | TGTCGGCCAGAGAGCCAGGAGCATCCTGAAGCTGACCCAGGCGCTGCCCCATACCTG | |
| | AAGACCAAGTTTATCTGTGTGACACCATTCATTGATGCAGTTTGGAAATAATGGTGA | |
| | AGGTGCTGAACCCTCAGCAGGAGGGCAGTTTGAGTCCCTCACCTTTGACATGGAGTT | |
| | GACCTCGGAGTGCGCTACCTCCCCCATGTGAGGAGCTGAGAACGGAAGCTGCAGAAA | |
| | GATACGACTGAGGCGCCTACCTGCATTCTGCCACCCCTCACACAGCCAAACCCCAGA | |
| | TCATCTGAAACTACTAACTTTGTGGTTCCAGATTTTTTTTAATCTCCTACTTCTGCT | |
| | ATCTTTGAGCAATCTGGGCACTTTTAAAAATAGAGAAATGAGTGAATGTGGGTGATC | |
| | TGCTTTTATCTAAATGCAAATAAGGATGTGTTCTCTGAGACCCATGATCAGGGGATG | |
| | TGGCGGGGGGTGGCTAGAGGGAGAAAAAGGAAATGTCTTGTGTTGTTTTGTTCCCCT | |
| | GCCCTCCTTTCTCAGCAGCTTTTTGTTATTGTTGTTGTTGTTCTTAGACAAGTGCCT | |
| | CCTGGTGCCTGCGGCATCCTTCTGCCTGTTTCTGTAAGCAAATGCCACAGGCCACCT | |
| | ATAGCTACATACTCCTGGCATTGCACTTTTTAACCTTGCTGACATCCAAATAGAAGA | |
| | TAGGACTATCTAAGCCCTAGGTTTCTTTTTAAATTAAGAAATAATAACAATTAAAGG | |
| | GCAAAAAACACTGTATCAGCATAGCCTTTCTGTATTTAAGAAACTTAAGCAGCCGGG | |
| | CATGGTGGCTCACGCCTGTAATCCCAGCACTTTGGGAGGCCGAGGCGGATCATAAGG | |
| | TCAGGAGATCAAGACCATCCTGGCTAACACGGTGAAACCCCGTCTCTACTAAAAGTA | |
| | CAAAAAATTAGCTGGGTGTGGTGGTGGGCGCCTGTAGTCCCAGCTACTCGGGAGGCT | |
| | GAGGCAGGAGAATCGCTTGAACCTGAGAGGCGGAGGTTGCAGTGAGCCAAAATTGCA | |
| | CCACTGCACACTGCACTCCATCCTGGGCGACAGTCTGAGACTCTGTCTCAAAAAAAA | |
| | AAAAAAAAAAAAGAAACTTCAGTTAACAGCCTCCTTGGTGCTTTAAGCATTCAGCTT | |
| | CCTTCAGGCTGGTAATTTATATAATCCCTGAAACGGGCTTCAGGTCAAACCCTTAAG | |
| | ACATCTGAAGCTGCAACCTGGCCTTTGGTGTTGAAATAGGAAGGTTTAAGGAGAATC | |
| | TAAGCATTTTAGACTTTTTTTTATAAATAGACTTATTTTCCTTTGTAATGTATTGGC | |
| | CTTTTAGTGAGTAAGGCTGGGCAGAGGGTGCTTACAACCTTGACTCCCTTTCTCCCT | |
| | GGACTTGATCTGCTGTTTCAGAGGCTAGGTTGTTTCTGTGGGTGCCTTATCAGGGCT | |
| | GGGATACTTCTGATTCTGGCTTCCTTCCTGCCCCACCCTCCCGACCCCAGTCCCCCT | |
| | GATCCTGCTAGAGGCATGTCTCCTTGCGTGTCTAAAGGTCCCTCATCCTGTTTGTTT | |
| | TAGGAATCCTGGTCTCAGGACCTCATGGAAGAAGAGGGGGAGAGAGTTACAGGTTGG | |
| | ACATGATGCACACTATGGGGCCCCAGCGACGTGTCTGGTTGAGCTCAGGGAATATGG | |
| | TTCTTAGCCAGTTTCTTGGTGATATCCAGTGGCACTTGTAATGGCGTCTTCATTCAG | |
| | TTCATGCAGGGCAAAGGCTTACTGATAAACTTGAGTCTGCCCTCGTATGAGGGTGTA | |
| | TACCTGGCCTCCCTCTGAGGCTGGTGACTCCTCCCTGCTGGGGCCCCACAGGTGAGG | |
| | CAGAACAGCTAGAGGGCCTCCCCGCCTGCCCGCCTTGGCTGGCTAGCTCGCCTCTCC | |
| | TGTGCGTATGGGAACACCTAGCACGTGCTGGATGGGCTGCCTCTGACTCAGAGGCAT | |
| | GGCCGGATTTGGCAACTCAAAACCACCTTGCCTCAGCTGATCAGAGTTTCTGTGGAA | |
| | TTCTGTTTGTTAAATCAAATTAGCTGGTCTCTGAATTAAGGGGGAGACGACCTTCTC | |
| | TAAGATGAACAGGGTTCGCCCCAGTCCTCCTGCCTGGAGACAGTTGATGTGTCATGC | |
| | AGAGCTCTTACTTCTCCAGCAACACTCTTCAGTACATAATAAGCTTAACTGATAAAC | |
| | AGAATATTTAGAAAGGTGAGACTTGGGCTTACCATTGGGTTTAAATCATAGGGACCT | |
| | AGGGCGAGGGTTCAGGGCTTCTCTGGAGCAGATATTGTCAAGTTCATGGCCTTAGGT | |
| | AGCATGTATCTGGTCTTAACTCTGATTGTAGCAAAAGTTCTGAGAGGAGCTGAGCCC | |
| | TGTTGTGGCCCATTAAAGAACAGGGTCCTCAGGCCCTGCCCGCTTCCTGTCCACTGC | |
| | CCCCTCCCCATCCCCAGCCCAGCCGAGGGAATCCCGTGGGTTGCTTACCTACCTATA | |
| | AGGTGGTTTATAAGCTGCTGTCCTGGCCACTGCATTCAAATTCCAATGTGTACTTCA | |
| | TAGTGTAAAAATTTATATTATTGTGAGGTTTTTTGTCTTTTTTTTTTTTTTTTTTTT | |
| | TTGGTATATTGCTGTATCTACTTTAACTTCCAGAAATAAACGTTATATAGGAACCGT | |
| | C | |

### STAT3 Pathway-Associated Disorder

[0125] The term “STAT3 pathway-associated disorder” refers to any disease or disorder in which the STAT3 pathway plays a role, e.g., cancer. STAT3 proteins act as a convergence point for number of oncogenic signaling pathways, and STAT3 activation has been implicated in 50-90% of human cancers (Leeman et al., Expert Opin on Biol Ther. (2006); Frank, Cancer Letters (2007); Kim et al., Cancers (2014); Liu et al., Cell Res. (2017), Gaudelli et al., Nature (2017); Yeh et al., Nature Communications (2017)). Without wishing to be bound by theory, it is thought that deactivating STAT3 proteins using the methods described herein (e.g., by inactivating, reducing, or inhibiting phosphorylation of STAT3) can effectively treat STAT3-related cancers by inhibiting STAT3 signalling. STAT3 has been found to be constitutively active in over 70% of human cancers, as the protein and its pathways prevent apoptosis, stimulate migration, stimulate proliferation, and increase angiogenesis. For example, the IL-6/JAK/STAT3 pathway has been found to be hyperactivated in many patients with cancer. Both in vitro and in vivo preclinical studies have demonstrated that targeting individual nodes in this pathway results in antitumor effects (Johnson et al., Nat Rev Clin Oncol. (2018)). Likewise, activation of the pathway has also been implicated in suppressing antitumor immune response in the tumor microenvironment. Examples of cancers related to STAT3 pathways include, but are not limited to: glioblastoma, melanoma, hepatocellular carcinoma, HNSCC, DLBCL, lymphoma, pancreatic cancer, NSCLC, CRC, breast cancer, prostate cancer, ovarian cancer, colon cancer, multiple myeloma, MHL, AML, ALL, CML, and nasalpharyngeal carcinoma (Huynh et al., Nat Rev Cancer (2018); Nair et al., Front Oncol. (2012); Pan et al., Nat Commun. (2018); Leeman et al., Expert Opin Biol Ther. (2006); Lin et al., Int J Mol Med. (2017)). Cancers may include any of the following cancers: Adenoid Cystic Carcinoma; Adrenal Gland Cancer; Amyloidosis; Anal Cancer; Ataxia-Telangiectasia; Atypical Mole Syndrome; Basal Cell Carcinoma; Bile Duct Cancer; Birt Hogg Dube Syndrome; Bladder Cancer; Bone Cancer; Brain Tumor; Breast Cancer; Breast Cancer in Men; Carcinoid Tumor; Cervical Cancer; Colorectal Cancer; Ductal Carcinoma; Endometrial Cancer; Esophageal Cancer; Gastric Cancer; Gastrointestinal Stromal Tumor—GIST; HER2-Positive Breast Cancer; Islet Cell Tumor; Juvenile Polyposis Syndrome; Kidney Cancer; Laryngeal Cancer; Leukemia—Acute Lymphoblastic Leukemia; Leukemia—Acute Lymphocytic (ALL); Leukemia—Acute Myeloid AML; Leukemia—Adult; Leukemia—Childhood; Leukemia—Chronic Lymphocytic—CLL; Leukemia—Chronic Myeloid—CML; Liver Cancer; Lobular Carcinoma; Lung Cancer; Lung Cancer—Small Cell; Lymphoma—Hodgkin's; Lymphoma—Non-Hodgkin's; Malignant Glioma; Melanoma; Meningioma; Multiple Myeloma; Myelodysplastic Syndrome (MDS); Nasopharyngeal Cancer; Neuroendocrine Tumor; Oral Cancer; Osteosarcoma; Ovarian Cancer; Pancreatic Cancer; Pancreatic Neuroendocrine Tumors; Parathyroid Cancer; Penile Cancer; Peritoneal Cancer; Peutz-Jeghers Syndrome; Pituitary Gland Tumor; Polycythemia Vera; Prostate Cancer; Renal Cell Carcinoma; Retinoblastoma; Salivary Gland Cancer; Sarcoma; Sarcoma—Kaposi; Skin Cancer; Small Intestine Cancer; Stomach Cancer; Testicular Cancer; Thymoma; Thyroid Cancer; Uterine (Endometrial) Cancer; Vaginal Cancer; or Wilms' Tumor.

napDNAbp (Cas9 Domains)

[0126] In one aspect, the methods and compositions described herein involve a nucleic acid programmable DNA binding protein (napDNAbp). Each napDNAbp is associated with at least one guide nucleic acid (e.g., guide RNA), which localizes the napDNAbp to a DNA sequence that comprises a DNA strand (i.e., a target strand) that is complementary to the guide nucleic acid, or a portion thereof (e.g., the spacer of a guide RNA that anneals to the complement of the proto spacer of the DNA target). In other words, the guide nucleic-acid “programs” the napDNAbp (e.g., Cas9 or equivalent) to localize and bind to a complementary sequence of the protospacer in the DNA. In various embodiments, the napDNAbp can be fused to a herein disclosed adenosine deaminase or cytidine deaminase.

[0127] Any suitable napDNAbp may be used in the methods and compositions described herein. In various embodiments, the napDNAbp may be any Class 2 CRISPR-Cas system, including any type II, type V, or type VI CRISPR-Cas enzyme. Given the rapid development of CRISPR-Cas as a tool for genome editing, there have been constant developments in the nomenclature used to describe and/or identify CRISPR-Cas enzymes, such as Cas9 and Cas9 orthologs. This application references CRISPR-Cas enzymes with nomenclature that may be old and/or new. The skilled person will be able to identify the specific CRISPR-Cas enzyme being referenced in this Application based on the nomenclature that is used, whether it is old (i.e., “legacy”) or new nomenclature. CRISPR-Cas nomenclature is extensively discussed in Makarova et al., “Classification and Nomenclature of CRISPR-Cas Systems: Where from Here?,” The CRISPR Journal, Vol. 1. No. 5, 2018, the entire contents of which are incorporated herein by reference. The particular CRISPR-Cas nomenclature used in any given instance in this Application is not limiting in any way and the skilled person will be able to identify which CRISPR-Cas enzyme is being referenced.

[0128] For example, the following type II, type V, and type VI Class 2 CRISPR-Cas enzymes have the following art-recognized old (i.e., legacy) and new names. Each of these enzymes, and/or variants thereof, may be used with the methods and base editor compositions described herein:

| | |
|---|---|
| Legacy nomenclature | Current nomenclature* |

type II CRISPR-Cas enzymes

| | |
|---|---|
| Cas9 | same |

type V CRISPR-Cas enzymes

| | |
|---|---|
| Cpf1 | Cas12a |
| CasX | Cas12e |
| C2c1 | Cas12b1 |
| Cas12b2 | same |
| C2c3 | Cas12c |
| CasY | Cas12d |
| C2c4 | same |
| C2c8 | same |
| C2c5 | same |
| C2c10 | same |
| C2c9 | same |

type VI CRISPR-Cas enzymes

| | |
|---|---|
| C2c2 | Cas13a |
| Cas13d | same |
| C2c7 | Cas13c |
| C2c6 | Cas13b |

*See Makarova et al., The CRISPR Journal, Vol. 1, No. 5, 2018

[0129] Without being bound by theory, the binding mechanism of certain napDNAbps contemplated herein, in general, includes the step of forming an R-loop whereby the napDNAbp induces the unwinding of a double-strand DNA target, thereby separating the strands in the region bound by the napDNAbp. The guide RNA spacer then hybridizes to the target strand at the protospacer sequence. This displaces a “non-target strand” that is complementary to the target strand, which forms the single strand region of the R-loop. In some embodiments, the napDNAbp includes one or more nuclease activities, which then cut the DNA leaving various types of lesions. For example, the napDNAbp may comprises a nuclease activity that cuts the non-target strand at a first location, and/or cuts the target strand at a second location. Depending on the nuclease activity, the target DNA can be cut to form a “double-stranded break” whereby both strands are cut. In other embodiments, the target DNA can be cut at only a single site, i.e., the DNA is “nicked” on one strand. Exemplary napDNAbp with different nuclease activities include “Cas9 nickase” (“nCas9”) and a deactivated Cas9 having no nuclease activities (“dead Cas9” or “dCas9”).

[0130] The below description of various napDNAbps which can be used in connection with the presently disclose base editors is not meant to be limiting in any way. The base editors may comprise the canonical SpCas9, or any ortholog Cas9 protein, or any variant Cas9 protein—including any naturally occurring variant, mutant, or otherwise engineered version of Cas9—that is known or which can be made or evolved through a directed evolutionary or otherwise mutagenic process. In various embodiments, the Cas9 or Cas9 variants have a nickase activity, i.e., only cleave one strand of the target DNA sequence. In other embodiments, the Cas9 or Cas9 variants have inactive nucleases, i.e., are “dead” Cas9 proteins. Other variant Cas9 proteins that may be used are those having a smaller molecular weight than the canonical SpCas9 (e.g., for easier delivery) or having modified or rearranged primary amino acid structure (e.g., the circular permutant formats).

[0131] The base editors described herein may also comprise Cas9 equivalents, including Cas12a (Cpf1) and Cas12b1 proteins which are the result of convergent evolution. The napDNAbps used herein (e.g., SpCas9, Cas9 variant, or Cas9 equivalents) may also may also contain various modifications that alter/enhance their PAM specificities. Lastly, the application contemplates any Cas9, Cas9 variant, or Cas9 equivalent which has at least 70%, at least 75%, at least 80%, at least 85%, at least 90%, at least 91%, at least 92%, at least 93%, at least 94%, at least 95%, at least 96%, at least 97%, at least 98%, at least 99%, or at least 99.9% sequence identity to a reference Cas9 sequence, such as a reference SpCas9 canonical sequence or a reference Cas9 equivalent (e.g., Cas12a (Cpf1)).

[0132] The napDNAbp can be a CRISPR (clustered regularly interspaced short palindromic repeat)-associated nuclease. As outlined above, CRISPR is an adaptive immune system that provides protection against mobile genetic elements (viruses, transposable elements and conjugative plasmids). CRISPR clusters contain spacers, sequences complementary to antecedent mobile elements, and target invading nucleic acids. CRISPR clusters are transcribed and processed into CRISPR RNA (crRNA). In type II CRISPR systems correct processing of pre-crRNA requires a trans-encoded small RNA (tracrRNA), endogenous ribonuclease 3 (rnc) and a Cas9 protein. The tracrRNA serves as a guide for ribonuclease 3-aided processing of pre-crRNA. Subsequently, Cas9/crRNA/tracrRNA endonucleolytically cleaves linear or circular dsDNA target complementary to the spacer. The target strand not complementary to crRNA is first cut endonucleolytically, then trimmed 3′-5′ exonucleolytically. In nature, DNA-binding and cleavage typically requires protein and both RNAs. However, single guide RNAs (“sgRNA”, or simply “gRNA”) can be engineered so as to incorporate aspects of both the crRNA and tracrRNA into a single RNA species. See, e.g., Jinek M. et al., Science 337:816-821(2012), the entire contents of which is hereby incorporated by reference.

[0133] In some embodiments, the napDNAbp directs cleavage of one or both strands at the location of a target sequence, such as within the target sequence and/or within the complement of the target sequence. In some embodiments, the napDNAbp directs cleavage of one or both strands within about 1, 2, 3, 4, 5, 6, 7, 8, 9, 10, 15, 20, 25, 50, 100, 200, 500, or more base pairs from the first or last nucleotide of a target sequence. In some embodiments, a vector encodes a napDNAbp that is mutated to with respect to a corresponding wild-type enzyme such that the mutated napDNAbp lacks the ability to cleave one or both strands of a target polynucleotide containing a target sequence. For example, an aspartate-to-alanine substitution (D10A) in the RuvC I catalytic domain of Cas9 from S. pyogenes converts Cas9 from a nuclease that cleaves both strands to a nickase (cleaves a single strand). Other examples of mutations that render Cas9 a nickase include, without limitation, H840A, N854A, and N863A in reference to the canonical SpCas9 sequence, or to equivalent amino acid positions in other Cas9 variants or Cas9 equivalents.

[0134] As used herein, the term “Cas protein” refers to a full-length Cas protein obtained from nature, a recombinant Cas protein having a sequences that differs from a naturally occurring Cas protein, or any fragment of a Cas protein that nevertheless retains all or a significant amount of the requisite basic functions needed for the disclosed methods, i.e., (i) possession of nucleic-acid programmable binding of the Cas protein to a target DNA, and (ii) ability to nick the target DNA sequence on one strand. The Cas proteins contemplated herein embrace CRISPR Cas 9 proteins, as well as Cas9 equivalents, variants (e.g., Cas9 nickase (nCas9) or nuclease inactive Cas9 (dCas9)) homologs, orthologs, or paralogs, whether naturally occurring or non-naturally occurring (e.g., engineered or recombinant), and may include a Cas9 equivalent from any Class 2 CRISPR system (e.g., type II, V, VI), including Cas12a (Cpf1), Cas12e (CasX), Cas12b1 (C2c1), Cas12b2, Cas12c (C2c3), C2c4, C2c8, C2c5, C2c10, C2c9 Cas13a (C2c2), Cas13d, Cas13c (C2c7), Cas13b (C2c6), and Cas13b. Further Cas-equivalents are described in Makarova et al., “C2c2 is a single-component programmable RNA-guided RNA-targeting CRISPR effector,” Science 2016; 353(6299) and Makarova et al., “Classification and Nomenclature of CRISPR-Cas Systems: Where from Here?,” The CRISPR Journal, Vol. 1 No. 5, 2018, the contents of which are incorporated herein by reference.

[0135] The terms “Cas9” or “Cas9 nuclease” or “Cas9 moiety” or “Cas9 domain” embrace any naturally occurring Cas9 from any organism, any naturally-occurring Cas9 equivalent or functional fragment thereof, any Cas9 homolog, ortholog, or paralog from any organism, and any mutant or variant of a Cas9, naturally-occurring or engineered. The term Cas9 is not meant to be particularly limiting and may be referred to as a “Cas9 or equivalent.” Exemplary Cas9 proteins are further described herein and/or are described in the art and are incorporated herein by reference. The present disclosure is unlimited with regard to the particular Cas9 that is employed in the base editor (BE) of the invention.

[0136] As noted herein, Cas9 nuclease sequences and structures are well known to those of skill in the art (see, e.g., “Complete genome sequence of an M1 strain of Streptococcus pyogenes.” Ferretti et al., J. J., McShan W. M., Ajdic D. J., Savic D. J., Savic G., Lyon K., Primeaux C., Sezate S., Suvorov A. N., Kenton S., Lai H. S., Lin S. P., Qian Y., Jia H. G., Najar F. Z., Ren Q., Zhu H., Song L., White J., Yuan X., Clifton S. W., Roe B. A., McLaughlin R. E., Proc. Natl. Acad. Sci. U.S.A. 98:4658-4663(2001); “CRISPR RNA maturation by trans-encoded small RNA and host factor RNase III.” Deltcheva E., Chylinski K., Sharma C. M., Gonzales K., Chao Y., Pirzada Z. A., Eckert M. R., Vogel J., Charpentier E., Nature 471:602-607(2011); and “A programmable dual-RNA-guided DNA endonuclease in adaptive bacterial immunity.” Jinek M., Chylinski K., Fonfara I., Hauer M., Doudna J. A., Charpentier E. Science 337:816-821(2012), the entire contents of each of which are incorporated herein by reference).

[0137] Examples of Cas9 and Cas9 equivalents are provided as follows; however, these specific examples are not meant to be limiting. The base editor fusions of the present disclosure may use any suitable napDNAbp, including any suitable Cas9 or Cas9 equivalent.

[0138] (i) Wild Type Canonical SpCas9

[0139] In one embodiment, the base editor constructs described herein may comprise the “canonical SpCas9” nuclease from S. pyogenes, which has been widely used as a tool for genome engineering and is categorized as the type II subgroup of enzyme of the Class 2 CRISPR-Cas systems. This Cas9 protein is a large, multi-domain protein containing two distinct nuclease domains. Point mutations can be introduced into Cas9 to abolish one or both nuclease activities, resulting in a nickase Cas9 (nCas9) or dead Cas9 (dCas9), respectively, that still retains its ability to bind DNA in a sgRNA-programmed manner. In principle, when fused to another protein or domain, Cas9 or a variant thereof (e.g., nCas9) can target that protein to virtually any DNA sequence simply by co-expression with an appropriate sgRNA. As used herein, the canonical SpCas9 protein refers to the wild type protein from Streptococcus pyogenes having the following amino acid sequence:

| Description | Sequence | SEQ ID NO: |
|---|---|---|
| SpCas 9 | MDKKYSIGLDIGTNSVGWAVITDEYKVPSKKFKVLGNTDRHSIKKNLIGALLFDS | SEQ ID NO: 74 |
| Streptococcus | GETAEATRLKRTARRRYTRRKNRICYLQEIFSNEMAKVDDSFFHRLEESFLVEED | |
| pyogenes | KKHERHPIFGNIVDEVAYHEKYPTIYHLRKKLVDSTDKADLRLIYLALAHMIKFR | |
| M1 | GHFLIEGDLNPDNSDVDKLFIQLVQTYNQLFEENPINASGVDAKAILSARLSKSR | |
| SwissProt | RLENLIAQLPGEKKNGLFGNLIALSLGLTPNFKSNFDLAEDAKLQLSKDTYDDDL | |
| Accession | DNLLAQIGDQYADLFLAAKNLSDAILLSDILRVNTEITKAPLSASMIKRYDEHHQ | |
| No. Q99ZW2 | DLTLLKALVRQQLPEKYKEIFFDQSKNGYAGYIDGGASQEEFYKFIKPILEKMDG | |
| Wild type | TEELLVKLNREDLLRKQRTFDNGSIPHQIHLGELHAILRRQEDFYPFLKDNREKI | |
| | EKILTFRIPYYVGPLARGNSRFAWMTRKSEETITPWNFEEVVDKGASAQSFIERM | |
| | TNFDKNLPNEKVLPKHSLLYEYFTVYNELTKVKYVTEGMRKPAFLSGEQKKAIVD | |
| | LLFKTNRKVTVKQLKEDYFKKIECFDSVEISGVEDRFNASLGTYHDLLKIIKDKD | |
| | FLDNEENEDILEDIVLTLTLFEDREMIEERLKTYAHLFDDKVMKQLKRRRYTGWG | |
| | RLSRKLINGIRDKQSGKTILDFLKSDGFANRNFMQLIHDDSLTFKEDIQKAQVSG | |
| | QGDSLHEHIANLAGSPAIKKGILQTVKVVDELVKVMGRHKPENIVIEMARENQTT | |
| | QKGQKNSRERMKRIEEGIKELGSQILKEHPVENTQLQNEKLYLYYLQNGRDMYVD | |
| | QELDINRLSDYDVDHIVPQSFLKDDSIDNKVLTRSDKNRGKSDNVPSEEVVKKMK | |
| | NYWRQLLNAKLITQRKFDNLTKAERGGLSELDKAGFIKRQLVETRQITKHVAQIL | |
| | DSRMNTKYDENDKLIREVKVITLKSKLVSDFRKDFQFYKVREINNYHHAHDAYLN | |
| | AVVGTALIKKYPKLESEFVYGDYKVYDVRKMIAKSEQEIGKATAKYFFYSNIMNF | |
| | FKTEITLANGEIRKRPLIETNGETGEIVWDKGRDFATVRKVLSMPQVNIVKKTEV | |
| | QTGGFSKESILPKRNSDKLIARKKDWDPKKYGGFDSPTVAYSVLVVAKVEKGKSK | |
| | KLKSVKELLGITIMERSSFEKNPIDFLEAKGYKEVKKDLIIKLPKYSLFELENGR | |
| | KRMLASAGELQKGNELALPSKYVNFLYLASHYEKLKGSPEDNEQKQLFVEQHKHY | |
| | LDEIIEQISEFSKRVILADANLDKVLSAYNKHRDKPIREQAENIIHLFTLTNLGA | |
| | PAAFKYFDTTIDRKRYTSTKEVLDATLIHQSITGLYETRIDLSQLGGD | |
| SpCas 9 | ATGGATAAAAAATATAGCATTGGCCTGGATATTGGCACCAACAGCGTGGGCTGGG | SEQ ID NO: 75 |
| Reverse | CGGTGATTACCGATGAATATAAAGTGCCGAGCAAAAAATTTAAAGTGCTGGGCAA | |
| translation | CACCGATCGCCATAGCATTAAAAAAAACCTGATTGGCGCGCTGCTGTTTGATAGC | |
| of | GGCGAAACCGCGGAAGCGACCCGCCTGAAACGCACCGCGCGCCGCCGCTATACCC | |
| SwissProt | GCCGCAAAAACCGCATTTGCTATCTGCAGGAAATTTTTAGCAACGAAATGGCGAA | |
| Accession | AGTGGATGATAGCTTTTTTCATCGCCTGGAAGAAAGCTTTCTGGTGGAAGAAGAT | |
| No. Q99ZW2 | AAAAAACATGAACGCCATCCGATTTTTGGCAACATTGTGGATGAAGTGGCGTATC | |
| Streptococcus | ATGAAAAATATCCGACCATTTATCATCTGCGCAAAAAACTGGTGGATAGCACCGA | |
| pyogenes | TAAAGCGGATCTGCGCCTGATTTATCTGGCGCTGGCGCATATGATTAAATTTCGC | |
| | GGCCATTTTCTGATTGAAGGCGATCTGAACCCGGATAACAGCGATGTGGATAAAC | |
| | TGTTTATTCAGCTGGTGCAGACCTATAACCAGCTGTTTGAAGAAAACCCGATTAA | |
| | CGCGAGCGGCGTGGATGCGAAAGCGATTCTGAGCGCGCGCCTGAGCAAAAGCCGC | |
| | CGCCTGGAAAACCTGATTGCGCAGCTGCCGGGCGAAAAAAAAAACGGCCTGTTTG | |
| | GCAACCTGATTGCGCTGAGCCTGGGCCTGACCCCGAACTTTAAAAGCAACTTTGA | |
| | TCTGGCGGAAGATGCGAAACTGCAGCTGAGCAAAGATACCTATGATGATGATCTG | |
| | GATAACCTGCTGGCGCAGATTGGCGATCAGTATGCGGATCTGTTTCTGGCGGCGA | |
| | AAAACCTGAGCGATGCGATTCTGCTGAGCGATATTCTGCGCGTGAACACCGAAAT | |
| | TACCAAAGCGCCGCTGAGCGCGAGCATGATTAAACGCTATGATGAACATCATCAG | |
| | GATCTGACCCTGCTGAAAGCGCTGGTGCGCCAGCAGCTGCCGGAAAAATATAAAG | |
| | AAATTTTTTTTGATCAGAGCAAAAACGGCTATGCGGGCTATATTGATGGCGGCGC | |
| | GAGCCAGGAAGAATTTTATAAATTTATTAAACCGATTCTGGAAAAAATGGATGGC | |
| | ACCGAAGAACTGCTGGTGAAACTGAACCGCGAAGATCTGCTGCGCAAACAGCGCA | |
| | CCTTTGATAACGGCAGCATTCCGCATCAGATTCATCTGGGCGAACTGCATGCGAT | |
| | TCTGCGCCGCCAGGAAGATTTTTATCCGTTTCTGAAAGATAACCGCGAAAAAATT | |
| | GAAAAAATTCTGACCTTTCGCATTCCGTATTATGTGGGCCCGCTGGCGCGCGGCA | |
| | ACAGCCGCTTTGCGTGGATGACCCGCAAAAGCGAAGAAACCATTACCCCGTGGAA | |
| | CTTTGAAGAAGTGGTGGATAAAGGCGCGAGCGCGCAGAGCTTTATTGAACGCATG | |
| | ACCAACTTTGATAAAAACCTGCCGAACGAAAAAGTGCTGCCGAAACATAGCCTGC | |
| | TGTATGAATATTTTACCGTGTATAACGAACTGACCAAAGTGAAATATGTGACCGA | |
| | AGGCATGCGCAAACCGGCGTTTCTGAGCGGCGAACAGAAAAAAGCGATTGTGGAT | |
| | CTGCTGTTTAAAACCAACCGCAAAGTGACCGTGAAACAGCTGAAAGAAGATTATT | |
| | TTAAAAAAATTGAATGCTTTGATAGCGTGGAAATTAGCGGCGTGGAAGATCGCTT | |
| | TAACGCGAGCCTGGGCACCTATCATGATCTGCTGAAAATTATTAAAGATAAAGAT | |
| | TTTCTGGATAACGAAGAAAACGAAGATATTCTGGAAGATATTGTGCTGACCCTGA | |
| | CCCTGTTTGAAGATCGCGAAATGATTGAAGAACGCCTGAAAACCTATGCGCATCT | |
| | GTTTGATGATAAAGTGATGAAACAGCTGAAACGCCGCCGCTATACCGGCTGGGGC | |
| | CGCCTGAGCCGCAAACTGATTAACGGCATTCGCGATAAACAGAGCGGCAAAACCA | |
| | TTCTGGATTTTCTGAAAAGCGATGGCTTTGCGAACCGCAACTTTATGCAGCTGAT | |
| | TCATGATGATAGCCTGACCTTTAAAGAAGATATTCAGAAAGCGCAGGTGAGCGGC | |
| | CAGGGCGATAGCCTGCATGAACATATTGCGAACCTGGCGGGCAGCCCGGCGATTA | |
| | AAAAAGGCATTCTGCAGACCGTGAAAGTGGTGGATGAACTGGTGAAAGTGATGGG | |
| | CCGCCATAAACCGGAAAACATTGTGATTGAAATGGCGCGCGAAAACCAGACCACC | |
| | CAGAAAGGCCAGAAAAACAGCCGCGAACGCATGAAACGCATTGAAGAAGGCATTA | |
| | AAGAACTGGGCAGCCAGATTCTGAAAGAACATCCGGTGGAAAACACCCAGCTGCA | |
| | GAACGAAAAACTGTATCTGTATTATCTGCAGAACGGCCGCGATATGTATGTGGAT | |
| | CAGGAACTGGATATTAACCGCCTGAGCGATTATGATGTGGATCATATTGTGCCGC | |
| | AGAGCTTTCTGAAAGATGATAGCATTGATAACAAAGTGCTGACCCGCAGCGATAA | |
| | AAACCGCGGCAAAAGCGATAACGTGCCGAGCGAAGAAGTGGTGAAAAAAATGAAA | |
| | AACTATTGGCGCCAGCTGCTGAACGCGAAACTGATTACCCAGCGCAAATTTGATA | |
| | ACCTGACCAAAGCGGAACGCGGCGGCCTGAGCGAACTGGATAAAGCGGGCTTTAT | |
| | TAAACGCCAGCTGGTGGAAACCCGCCAGATTACCAAACATGTGGCGCAGATTCTG | |
| | GATAGCCGCATGAACACCAAATATGATGAAAACGATAAACTGATTCGCGAAGTGA | |
| | AAGTGATTACCCTGAAAAGCAAACTGGTGAGCGATTTTCGCAAAGATTTTCAGTT | |
| | TTATAAAGTGCGCGAAATTAACAACTATCATCATGCGCATGATGCGTATCTGAAC | |
| | GCGGTGGTGGGCACCGCGCTGATTAAAAAATATCCGAAACTGGAAAGCGAATTTG | |
| | TGTATGGCGATTATAAAGTGTATGATGTGCGCAAAATGATTGCGAAAAGCGAACA | |
| | GGAAATTGGCAAAGCGACCGCGAAATATTTTTTTTATAGCAACATTATGAACTTT | |
| | TTTAAAACCGAAATTACCCTGGCGAACGGCGAAATTCGCAAACGCCCGCTGATTG | |
| | AAACCAACGGCGAAACCGGCGAAATTGTGTGGGATAAAGGCCGCGATTTTGCGAC | |
| | CGTGCGCAAAGTGCTGAGCATGCCGCAGGTGAACATTGTGAAAAAAACCGAAGTG | |
| | CAGACCGGCGGCTTTAGCAAAGAAAGCATTCTGCCGAAACGCAACAGCGATAAAC | |
| | TGATTGCGCGCAAAAAAGATTGGGATCCGAAAAAATATGGCGGCTTTGATAGCCC | |
| | GACCGTGGCGTATAGCGTGCTGGTGGTGGCGAAAGTGGAAAAAGGCAAAAGCAAA | |
| | AAACTGAAAAGCGTGAAAGAACTGCTGGGCATTACCATTATGGAACGCAGCAGCT | |
| | TTGAAAAAAACCCGATTGATTTTCTGGAAGCGAAAGGCTATAAAGAAGTGAAAAA | |
| | AGATCTGATTATTAAACTGCCGAAATATAGCCTGTTTGAACTGGAAAACGGCCGC | |
| | AAACGCATGCTGGCGAGCGCGGGCGAACTGCAGAAAGGCAACGAACTGGCGCTGC | |
| | CGAGCAAATATGTGAACTTTCTGTATCTGGCGAGCCATTATGAAAAACTGAAAGG | |
| | CAGCCCGGAAGATAACGAACAGAAACAGCTGTTTGTGGAACAGCATAAACATTAT | |
| | CTGGATGAAATTATTGAACAGATTAGCGAATTTAGCAAACGCGTGATTCTGGCGG | |
| | ATGCGAACCTGGATAAAGTGCTGAGCGCGTATAACAAACATCGCGATAAACCGAT | |
| | TCGCGAACAGGCGGAAAACATTATTCATCTGTTTACCCTGACCAACCTGGGCGCG | |
| | CCGGCGGCGTTTAAATATTTTGATACCACCATTGATCGCAAACGCTATACCAGCA | |
| | CCAAAGAAGTGCTGGATGCGACCCTGATTCATCAGAGCATTACCGGCCTGTATGA | |
| | AACCCGCATTGATCTGAGCCAGCTGGGCGGCGAT | |

[0140] The base editors described herein may include canonical SpCas9, or any variant thereof having at least 80%, at least 85%, at least 90%, at least 95%, or at least 99% sequence identity with a wild type Cas9 sequence provided above. These variants may include SpCas9 variants containing one or more mutations, including any known mutation reported with the SwissProt Accession No. Q99ZW2 entry, which include:

| SpCas9 mutation (relative | |
|---|---|
| to the amino acid sequence | Function/Characteristic (as reported) (see |
| of the canonical SpCas9 | UniProtKB-Q99ZW2 (CAS9_STRPT1) |
| sequence, SEQ ID NO: 74) | entry-incorporated herein by reference) |
| D10A | Nickase mutant which cleaves the |
| | protospacer strand (but no cleavage of |
| | non-protospacer strand) |
| S15A | Decreased DNA cleavage activity |
| R66A | Decreased DNA cleavage activity |
| R70A | No DNA cleavage |
| R74A | Decreased DNA cleavage |
| R78A | Decreased DNA cleavage |
| 97-150 deletion | No nuclease activity |
| R165A | Decreased DNA cleavage |
| 175-307 deletion | About 50% decreased DNA cleavage |
| 312-409 deletion | No nuclease activity |
| E762A | Nickase |
| H840A | Nickase mutant which cleaves the non- |
| | protospacer strand but does not cleave |
| | the protospacer strand |
| N854A | Nickase |
| N8 63A | Nickase |
| H982A | Decreased DNA cleavage |
| D986A | Nickase |
| 1099-1368 deletion | No nuclease activity |
| R1333A | Reduced DNA binding |

[0141] Other wild type SpCas9 sequences that may be used in the present disclosure, include:

| Description | Sequence | SEQ ID NO: |
|---|---|---|
| SpCas9 | ATGGATAAGAAATACTCAATAGGCTTAGATATCGGCACAAATAGCGTCGGATGGGCG | SEQ ID NO: 76 |
| Streptococcus | GTGATCACTGATGATTATAAGGTTCCGTCTAAAAAGTTCAAGGTTCTGGGAAATACA | |
| pyogenes | GACCGCCACAGTATCAAAAAAAATCTTATAGGGGCTCTTTTATTTGGCAGTGGAGAG | |
| MGAS1882 | ACAGCGGAAGCGACTCGTCTCAAACGGACAGCTCGTAGAAGGTATACACGTCGGAAG | |
| wild type | AATCGTATTTGTTATCTACAGGAGATTTTTTCAAATGAGATGGCGAAAGTAGATGAT | |
| NC_017053.1 | AGTTTCTTTCATCGACTTGAAGAGTCTTTTTTGGTGGAAGAAGACAAGAAGCATGAA | |
| | CGTCATCCTATTTTTGGAAATATAGTAGATGAAGTTGCTTATCATGAGAAATATCCA | |
| | ACTATCTATCATCTGCGAAAAAAATTGGCAGATTCTACTGATAAAGCGGATTTGCGC | |
| | TTAATCTATTTGGCCTTAGCGCATATGATTAAGTTTCGTGGTCATTTTTTGATTGAG | |
| | GGAGATTTAAATCCTGATAATAGTGATGTGGACAAACTATTTATCCAGTTGGTACAA | |
| | ATCTACAATCAATTATTTGAAGAAAACCCTATTAACGCAAGTAGAGTAGATGCTAAA | |
| | GCGATTCTTTCTGCACGATTGAGTAAATCAAGACGATTAGAAAATCTCATTGCTCAG | |
| | CTCCCCGGTGAGAAGAGAAATGGCTTGTTTGGGAATCTCATTGCTTTGTCATTGGGA | |
| | TTGACCCCTAATTTTAAATCAAATTTTGATTTGGCAGAAGATGCTAAATTACAGCTT | |
| | TCAAAAGATACTTACGATGATGATTTAGATAATTTATTGGCGCAAATTGGAGATCAA | |
| | TATGCTGATTTGTTTTTGGCAGCTAAGAATTTATCAGATGCTATTTTACTTTCAGAT | |
| | ATCCTAAGAGTAAATAGTGAAATAACTAAGGCTCCCCTATCAGCTTCAATGATTAAG | |
| | CGCTACGATGAACATCATCAAGACTTGACTCTTTTAAAAGCTTTAGTTCGACAACAA | |
| | CTTCCAGAAAAGTATAAAGAAATCTTTTTTGATCAATCAAAAAACGGATATGCAGGT | |
| | TATATTGATGGGGGAGCTAGCCAAGAAGAATTTTATAAATTTATCAAACCAATTTTA | |
| | GAAAAAATGGATGGTACTGAGGAATTATTGGTGAAACTAAATCGTGAAGATTTGCTG | |
| | CGCAAGCAACGGACCTTTGACAACGGCTCTATTCCCCATCAAATTCACTTGGGTGAG | |
| | CTGCATGCTATTTTGAGAAGACAAGAAGACTTTTATCCATTTTTAAAAGACAATCGT | |
| | GAGAAGATTGAAAAAATCTTGACTTTTCGAATTCCTTATTATGTTGGTCCATTGGCG | |
| | CGTGGCAATAGTCGTTTTGCATGGATGACTCGGAAGTCTGAAGAAACAATTACCCCA | |
| | TGGAATTTTGAAGAAGTTGTCGATAAAGGTGCTTCAGCTCAATCATTTATTGAACGC | |
| | ATGACAAACTTTGATAAAAATCTTCCAAATGAAAAAGTACTACCAAAACATAGTTTG | |
| | CTTTATGAGTATTTTACGGTTTATAACGAATTGACAAAGGTCAAATATGTTACTGAG | |
| | GGAATGCGAAAACCAGCATTTCTTTCAGGTGAACAGAAGAAAGCCATTGTTGATTTA | |
| | CTCTTCAAAACAAATCGAAAAGTAACCGTTAAGCAATTAAAAGAAGATTATTTCAAA | |
| | AAAATAGAATGTTTTGATAGTGTTGAAATTTCAGGAGTTGAAGATAGATTTAATGCT | |
| | TCATTAGGCGCCTACCATGATTTGCTAAAAATTATTAAAGATAAAGATTTTTTGGAT | |
| | AATGAAGAAAATGAAGATATCTTAGAGGATATTGTTTTAACATTGACCTTATTTGAA | |
| | GATAGGGGGATGATTGAGGAAAGACTTAAAACATATGCTCACCTCTTTGATGATAAG | |
| | GTGATGAAACAGCTTAAACGTCGCCGTTATACTGGTTGGGGACGTTTGTCTCGAAAA | |
| | TTGATTAATGGTATTAGGGATAAGCAATCTGGCAAAACAATATTAGATTTTTTGAAA | |
| | TCAGATGGTTTTGCCAATCGCAATTTTATGCAGCTGATCCATGATGATAGTTTGACA | |
| | TTTAAAGAAGATATTCAAAAAGCACAGGTGTCTGGACAAGGCCATAGTTTACATGAA | |
| | CAGATTGCTAACTTAGCTGGCAGTCCTGCTATTAAAAAAGGTATTTTACAGACTGTA | |
| | AAAATTGTTGATGAACTGGTCAAAGTAATGGGGCATAAGCCAGAAAATATCGTTATT | |
| | GAAATGGCACGTGAAAATCAGACAACTCAAAAGGGCCAGAAAAATTCGCGAGAGCGT | |
| | ATGAAACGAATCGAAGAAGGTATCAAAGAATTAGGAAGTCAGATTCTTAAAGAGCAT | |
| | CCTGTTGAAAATACTCAATTGCAAAATGAAAAGCTCTATCTCTATTATCTACAAAAT | |
| | GGAAGAGACATGTATGTGGACCAAGAATTAGATATTAATCGTTTAAGTGATTATGAT | |
| | GTCGATCACATTGTTCCACAAAGTTTCATTAAAGACGATTCAATAGACAATAAGGTA | |
| | CTAACGCGTTCTGATAAAAATCGTGGTAAATCGGATAACGTTCCAAGTGAAGAAGTA | |
| | GTCAAAAAGATGAAAAACTATTGGAGACAACTTCTAAACGCCAAGTTAATCACTCAA | |
| | CGTAAGTTTGATAATTTAACGAAAGCTGAACGTGGAGGTTTGAGTGAACTTGATAAA | |
| | GCTGGTTTTATCAAACGCCAATTGGTTGAAACTCGCCAAATCACTAAGCATGTGGCA | |
| | CAAATTTTGGATAGTCGCATGAATACTAAATACGATGAAAATGATAAACTTATTCGA | |
| | GAGGTTAAAGTGATTACCTTAAAATCTAAATTAGTTTCTGACTTCCGAAAAGATTTC | |
| | CAATTCTATAAAGTACGTGAGATTAACAATTACCATCATGCCCATGATGCGTATCTA | |
| | AATGCCGTCGTTGGAACTGCTTTGATTAAGAAATATCCAAAACTTGAATCGGAGTTT | |
| | GTCTATGGTGATTATAAAGTTTATGATGTTCGTAAAATGATTGCTAAGTCTGAGCAA | |
| | GAAATAGGCAAAGCAACCGCAAAATATTTCTTTTACTCTAATATCATGAACTTCTTC | |
| | AAAACAGAAATTACACTTGCAAATGGAGAGATTCGCAAACGCCCTCTAATCGAAACT | |
| | AATGGGGAAACTGGAGAAATTGTCTGGGATAAAGGGCGAGATTTTGCCACAGTGCGC | |
| | AAAGTATTGTCCATGCCCCAAGTCAATATTGTCAAGAAAACAGAAGTACAGACAGGC | |
| | GGATTCTCCAAGGAGTCAATTTTACCAAAAAGAAATTCGGACAAGCTTATTGCTCGT | |
| | AAAAAAGACTGGGATCCAAAAAAATATGGTGGTTTTGATAGTCCAACGGTAGCTTAT | |
| | TCAGTCCTAGTGGTTGCTAAGGTGGAAAAAGGGAAATCGAAGAAGTTAAAATCCGTT | |
| | AAAGAGTTACTAGGGATCACAATTATGGAAAGAAGTTCCTTTGAAAAAAATCCGATT | |
| | GACTTTTTAGAAGCTAAAGGATATAAGGAAGTTAAAAAAGACTTAATCATTAAACTA | |
| | CCTAAATATAGTCTTTTTGAGTTAGAAAACGGTCGTAAACGGATGCTGGCTAGTGCC | |
| | GGAGAATTACAAAAAGGAAATGAGCTGGCTCTGCCAAGCAAATATGTGAATTTTTTA | |
| | TATTTAGCTAGTCATTATGAAAAGTTGAAGGGTAGTCCAGAAGATAACGAACAAAAA | |
| | CAATTGTTTGTGGAGCAGCATAAGCATTATTTAGATGAGATTATTGAGCAAATCAGT | |
| | GAATTTTCTAAGCGTGTTATTTTAGCAGATGCCAATTTAGATAAAGTTCTTAGTGCA | |
| | TATAACAAACATAGAGACAAACCAATACGTGAACAAGCAGAAAATATTATTCATTTA | |
| | TTTACGTTGACGAATCTTGGAGCTCCCGCTGCTTTTAAATATTTTGATACAACAATT | |
| | GATCGTAAACGATATACGTCTACAAAAGAAGTTTTAGATGCCACTCTTATCCATCAA | |
| | TCCATCACTGGTCTTTATGAAACACGCATTGATTTGAGTCAGCTAGGAGGTGACTGA | |
| SpCas9 | MDKKYSIGLDIGTNSVGWAVITDDYKVPSKKFKVLGNTDRHSIKKNLIGALLFGSGE | SEQ ID NO: 77 |
| Streptococcus | TAEATRLKRTARRRYTRRKNRICYLQEIFSNEMAKVDDSFFHRLEESFLVEEDKKHE | |
| pyogenes | RHPIFGNIVDEVAYHEKYPTIYHLRKKLADSTDKADLRLIYLALAHMIKFRGHFLIE | |
| MGAS1882 | GDLNPDNSDVDKLFIQLVQIYNQLFEENPINASRVDAKAILSARLSKSRRLENLIAQ | |
| wild type | LPGEKRNGLFGNLIALSLGLTPNFKSNFDLAEDAKLQLSKDTYDDDLDNLLAQIGDQ | |
| NC_017053.1 | YADLFLAAKNLSDAILLSDILRVNSEITKAPLSASMIKRYDEHHQDLTLLKALVRQQ | |
| | LPEKYKEIFFDQSKNGYAGYIDGGASQEEFYKFIKPILEKMDGTEELLVKLNREDLL | |
| | RKQRTFDNGSIPHQIHLGELHAILRRQEDFYPFLKDNREKIEKILTFRIPYYVGPLA | |
| | RGNSRFAWMTRKSEETITPWNFEEVVDKGASAQSFIERMTNFDKNLPNEKVLPKHSL | |
| | LYEYFTVYNELTKVKYVTEGMRKPAFLSGEQKKAIVDLLFKTNRKVTVKQLKEDYFK | |
| | KIECFDSVEISGVEDRFNASLGAYHDLLKIIKDKDFLDNEENEDILEDIVLTLTLFE | |
| | DRGMIEERLKTYAHLFDDKVMKQLKRRRYTGWGRLSRKLINGIRDKQSGKTILDFLK | |
| | SDGFANRNFMQLIHDDSLTFKEDIQKAQVSGQGHSLHEQIANLAGSPAIKKGILQTV | |
| | KIVDELVKVMGHKPENIVIEMARENQTTQKGQKNSRERMKRIEEGIKELGSQILKEH | |
| | PVENTQLQNEKLYLYYLQNGRDMYVDQELDINRLSDYDVDHIVPQSFIKDDSIDNKV | |
| | LTRSDKNRGKSDNVPSEEVVKKMKNYWRQLLNAKLITQRKFDNLTKAERGGLSELDK | |
| | AGFIKRQLVETRQITKHVAQILDSRMNTKYDENDKLIREVKVITLKSKLVSDFRKDF | |
| | QFYKVREINNYHHAHDAYLNAVVGTALIKKYPKLESEFVYGDYKVYDVRKMIAKSEQ | |
| | EIGKATAKYFFYSNIMNFFKTEITLANGEIRKRPLIETNGETGEIVWDKGRDFATVR | |
| | KVLSMPQVNIVKKTEVQTGGFSKESILPKRNSDKLIARKKDWDPKKYGGFDSPTVAY | |
| | SVLVVAKVEKGKSKKLKSVKELLGITIMERSSFEKNPIDFLEAKGYKEVKKDLIIKL | |
| | PKYSLFELENGRKRMLASAGELQKGNELALPSKYVNFLYLASHYEKLKGSPEDNEQK | |
| | QLFVEQHKHYLDEIIEQISEFSKRVILADANLDKVLSAYNKHRDKPIREQAENIIHL | |
| | FTLTNLGAPAAFKYFDTTIDRKRYTSTKEVLDATLIHQSITGLYETRIDLSQLGGD | |
| SpCas9 | ATGGATAAAAAGTATTCTATTGGTTTAGACATCGGCACTAATTCCGTTGGATGGGCT | SEQ ID NO: 78 |
| Streptococcus | GTCATAACCGATGAATACAAAGTACCTTCAAAGAAATTTAAGGTGTTGGGGAACACA | |
| pyogenes | GACCGTCATTCGATTAAAAAGAATCTTATCGGTGCCCTCCTATTCGATAGTGGCGAA | |
| wild type | ACGGCAGAGGCGACTCGCCTGAAACGAACCGCTCGGAGAAGGTATACACGTCGCAAG | |
| SWBC2D7W014 | AACCGAATATGTTACTTACAAGAAATTTTTAGCAATGAGATGGCCAAAGTTGACGAT | |
| | TCTTTCTTTCACCGTTTGGAAGAGTCCTTCCTTGTCGAAGAGGACAAGAAACATGAA | |
| | CGGCACCCCATCTTTGGAAACATAGTAGATGAGGTGGCATATCATGAAAAGTACCCA | |
| | ACGATTTATCACCTCAGAAAAAAGCTAGTTGACTCAACTGATAAAGCGGACCTGAGG | |
| | TTAATCTACTTGGCTCTTGCCCATATGATAAAGTTCCGTGGGCACTTTCTCATTGAG | |
| | GGTGATCTAAATCCGGACAACTCGGATGTCGACAAACTGTTCATCCAGTTAGTACAA | |
| | ACCTATAATCAGTTGTTTGAAGAGAACCCTATAAATGCAAGTGGCGTGGATGCGAAG | |
| | GCTATTCTTAGCGCCCGCCTCTCTAAATCCCGACGGCTAGAAAACCTGATCGCACAA | |
| | TTACCCGGAGAGAAGAAAAATGGGTTGTTCGGTAACCTTATAGCGCTCTCACTAGGC | |
| | CTGACACCAAATTTTAAGTCGAACTTCGACTTAGCTGAAGATGCCAAATTGCAGCTT | |
| | AGTAAGGACACGTACGATGACGATCTCGACAATCTACTGGCACAAATTGGAGATCAG | |
| | TATGCGGACTTATTTTTGGCTGCCAAAAACCTTAGCGATGCAATCCTCCTATCTGAC | |
| | ATACTGAGAGTTAATACTGAGATTACCAAGGCGCCGTTATCCGCTTCAATGATCAAA | |
| | AGGTACGATGAACATCACCAAGACTTGACACTTCTCAAGGCCCTAGTCCGTCAGCAA | |
| | CTGCCTGAGAAATATAAGGAAATATTCTTTGATCAGTCGAAAAACGGGTACGCAGGT | |
| | TATATTGACGGCGGAGCGAGTCAAGAGGAATTCTACAAGTTTATCAAACCCATATTA | |
| | GAGAAGATGGATGGGACGGAAGAGTTGCTTGTAAAACTCAATCGCGAAGATCTACTG | |
| | CGAAAGCAGCGGACTTTCGACAACGGTAGCATTCCACATCAAATCCACTTAGGCGAA | |
| | TTGCATGCTATACTTAGAAGGCAGGAGGATTTTTATCCGTTCCTCAAAGACAATCGT | |
| | GAAAAGATTGAGAAAATCCTAACCTTTCGCATACCTTACTATGTGGGACCCCTGGCC | |
| | CGAGGGAACTCTCGGTTCGCATGGATGACAAGAAAGTCCGAAGAAACGATTACTCCA | |
| | TGGAATTTTGAGGAAGTTGTCGATAAAGGTGCGTCAGCTCAATCGTTCATCGAGAGG | |
| | ATGACCAACTTTGACAAGAATTTACCGAACGAAAAAGTATTGCCTAAGCACAGTTTA | |
| | CTTTACGAGTATTTCACAGTGTACAATGAACTCACGAAAGTTAAGTATGTCACTGAG | |
| | GGCATGCGTAAACCCGCCTTTCTAAGCGGAGAACAGAAGAAAGCAATAGTAGATCTG | |
| | TTATTCAAGACCAACCGCAAAGTGACAGTTAAGCAATTGAAAGAGGACTACTTTAAG | |
| | AAAATTGAATGCTTCGATTCTGTCGAGATCTCCGGGGTAGAAGATCGATTTAATGCG | |
| | TCACTTGGTACGTATCATGACCTCCTAAAGATAATTAAAGATAAGGACTTCCTGGAT | |
| | AACGAAGAGAATGAAGATATCTTAGAAGATATAGTGTTGACTCTTACCCTCTTTGAA | |
| | GATCGGGAAATGATTGAGGAAAGACTAAAAACATACGCTCACCTGTTCGACGATAAG | |
| | GTTATGAAACAGTTAAAGAGGCGTCGCTATACGGGCTGGGGACGATTGTCGCGGAAA | |
| | CTTATCAACGGGATAAGAGACAAGCAAAGTGGTAAAACTATTCTCGATTTTCTAAAG | |
| | AGCGACGGCTTCGCCAATAGGAACTTTATGCAGCTGATCCATGATGACTCTTTAACC | |
| | TTCAAAGAGGATATACAAAAGGCACAGGTTTCCGGACAAGGGGACTCATTGCACGAA | |
| | CATATTGCGAATCTTGCTGGTTCGCCAGCCATCAAAAAGGGCATACTCCAGACAGTC | |
| | AAAGTAGTGGATGAGCTAGTTAAGGTCATGGGACGTCACAAACCGGAAAACATTGTA | |
| | ATCGAGATGGCACGCGAAAATCAAACGACTCAGAAGGGGCAAAAAAACAGTCGAGAG | |
| | CGGATGAAGAGAATAGAAGAGGGTATTAAAGAACTGGGCAGCCAGATCTTAAAGGAG | |
| | CATCCTGTGGAAAATACCCAATTGCAGAACGAGAAACTTTACCTCTATTACCTACAA | |
| | AATGGAAGGGACATGTATGTTGATCAGGAACTGGACATAAACCGTTTATCTGATTAC | |
| | GACGTCGATCACATTGTACCCCAATCCTTTTTGAAGGACGATTCAATCGACAATAAA | |
| | GTGCTTACACGCTCGGATAAGAACCGAGGGAAAAGTGACAATGTTCCAAGCGAGGAA | |
| | GTCGTAAAGAAAATGAAGAACTATTGGCGGCAGCTCCTAAATGCGAAACTGATAACG | |
| | CAAAGAAAGTTCGATAACTTAACTAAAGCTGAGAGGGGTGGCTTGTCTGAACTTGAC | |
| | AAGGCCGGATTTATTAAACGTCAGCTCGTGGAAACCCGCCAAATCACAAAGCATGTT | |
| | GCACAGATACTAGATTCCCGAATGAATACGAAATACGACGAGAACGATAAGCTGATT | |
| | CGGGAAGTCAAAGTAATCACTTTAAAGTCAAAATTGGTGTCGGACTTCAGAAAGGAT | |
| | TTTCAATTCTATAAAGTTAGGGAGATAAATAACTACCACCATGCGCACGACGCTTAT | |
| | CTTAATGCCGTCGTAGGGACCGCACTCATTAAGAAATACCCGAAGCTAGAAAGTGAG | |
| | TTTGTGTATGGTGATTACAAAGTTTATGACGTCCGTAAGATGATCGCGAAAAGCGAA | |
| | CAGGAGATAGGCAAGGCTACAGCCAAATACTTCTTTTATTCTAACATTATGAATTTC | |
| | TTTAAGACGGAAATCACTCTGGCAAACGGAGAGATACGCAAACGACCTTTAATTGAA | |
| | ACCAATGGGGAGACAGGTGAAATCGTATGGGATAAGGGCCGGGACTTCGCGACGGTG | |
| | AGAAAAGTTTTGTCCATGCCCCAAGTCAACATAGTAAAGAAAACTGAGGTGCAGACC | |
| | GGAGGGTTTTCAAAGGAATCGATTCTTCCAAAAAGGAATAGTGATAAGCTCATCGCT | |
| | CGTAAAAAGGACTGGGACCCGAAAAAGTACGGTGGCTTCGATAGCCCTACAGTTGCC | |
| | TATTCTGTCCTAGTAGTGGCAAAAGTTGAGAAGGGAAAATCCAAGAAACTGAAGTCA | |
| | GTCAAAGAATTATTGGGGATAACGATTATGGAGCGCTCGTCTTTTGAAAAGAACCCC | |
| | ATCGACTTCCTTGAGGCGAAAGGTTACAAGGAAGTAAAAAAGGATCTCATAATTAAA | |
| | CTACCAAAGTATAGTCTGTTTGAGTTAGAAAATGGCCGAAAACGGATGTTGGCTAGC | |
| | GCCGGAGAGCTTCAAAAGGGGAACGAACTCGCACTACCGTCTAAATACGTGAATTTC | |
| | CTGTATTTAGCGTCCCATTACGAGAAGTTGAAAGGTTCACCTGAAGATAACGAACAG | |
| | AAGCAACTTTTTGTTGAGCAGCACAAACATTATCTCGACGAAATCATAGAGCAAATT | |
| | TCGGAATTCAGTAAGAGAGTCATCCTAGCTGATGCCAATCTGGACAAAGTATTAAGC | |
| | GCATACAACAAGCACAGGGATAAACCCATACGTGAGCAGGCGGAAAATATTATCCAT | |
| | TTGTTTACTCTTACCAACCTCGGCGCTCCAGCCGCATTCAAGTATTTTGACACAACG | |
| | ATAGATCGCAAACGATACACTTCTACCAAGGAGGTGCTAGACGCGACACTGATTCAC | |
| | CAATCCATCACGGGATTATATGAAACTCGGATAGATTTGTCACAGCTTGGGGGTGAC | |
| | GGATCCCCCAAGAAGAAGAGGAAAGTCTCGAGCGACTACAAAGACCATGACGGTGAT | |
| | TATAAAGATCATGACATCGATTACAAGGATGACGATGACAAGGCTGCAGGA | |
| SpCas9 | MDKKYSIGLDIGTNSVGWAVITDEYKVPSKKFKVLGNTDRHSIKKNLIGALLFDSGE | SEQ ID NO: 79 |
| Streptococcus | TAEATRLKRTARRRYTRRKNRICYLQEIFSNEMAKVDDSFFHRLEESFLVEEDKKHE | |
| pyogenes | RHPIFGNIVDEVAYHEKYPTIYHLRKKLVDSTDKADLRLIYLALAHMIKFRGHFLIE | |
| wild type | GDLNPDNSDVDKLFIQLVQTYNQLFEENPINASGVDAKAILSARLSKSRRLENLIAQ | |
| Encoded | LPGEKKNGLFGNLIALSLGLTPNFKSNFDLAEDAKLQLSKDTYDDDLDNLLAQIGDQ | |
| product of | YADLFLAAKNLSDAILLSDILRVNTEITKAPLSASMIKRYDEHHQDLTLLKALVRQQ | |
| SWBC2D7W014 | LPEKYKEIFFDQSKNGYAGYIDGGASQEEFYKFIKPILEKMDGTEELLVKLNREDLL | |
| | RKQRTFDNGSIPHQIHLGELHAILRRQEDFYPFLKDNREKIEKILTFRIPYYVGPLA | |
| | RGNSRFAWMTRKSEETITPWNFEEVVDKGASAQSFIERMTNFDKNLPNEKVLPKHSL | |
| | LYEYFTVYNELTKVKYVTEGMRKPAFLSGEQKKAIVDLLFKTNRKVTVKQLKEDYFK | |
| | KIECFDSVEISGVEDRFNASLGTYHDLLKIIKDKDFLDNEENEDILEDIVLTLTLFE | |
| | DREMIEERLKTYAHLFDDKVMKQLKRRRYTGWGRLSRKLINGIRDKQSGKTILDFLK | |
| | SDGFANRNFMQLIHDDSLTFKEDIQKAQVSGQGDSLHEHIANLAGSPAIKKGILQTV | |
| | KVVDELVKVMGRHKPENIVIEMARENQTTQKGQKNSRERMKRIEEGIKELGSQILKE | |
| | HPVENTQLQNEKLYLYYLQNGRDMYVDQELDINRLSDYDVDHIVPQSFLKDDSIDNK | |
| | VLTRSDKNRGKSDNVPSEEVVKKMKNYWRQLLNAKLITQRKFDNLTKAERGGLSELD | |
| | KAGFIKRQLVETRQITKHVAQILDSRMNTKYDENDKLIREVKVITLKSKLVSDFRKD | |
| | FQFYKVREINNYHHAHDAYLNAVVGTALIKKYPKLESEFVYGDYKVYDVRKMIAKSE | |
| | QEIGKATAKYFFYSNIMNFFKTEITLANGEIRKRPLIETNGETGEIVWDKGRDFATV | |
| | RKVLSMPQVNIVKKTEVQTGGFSKESILPKRNSDKLIARKKDWDPKKYGGFDSPTVA | |
| | YSVLVVAKVEKGKSKKLKSVKELLGITIMERSSFEKNPIDFLEAKGYKEVKKDLIIK | |
| | LPKYSLFELENGRKRMLASAGELQKGNELALPSKYVNFLYLASHYEKLKGSPEDNEQ | |
| | KQLFVEQHKHYLDEIIEQISEFSKRVILADANLDKVLSAYNKHRDKPIREQAENIIH | |
| | LFTLTNLGAPAAFKYFDTTIDRKRYTSTKEVLDATLIHQSITGLYETRIDLSQLGGD | |
| | GSPKKKRKVSSDYKDHDGDYKDHDIDYKDDDDKAAG | |
| SpCas9 | ATGGATAAGAAATACTCAATAGGCTTAGATATCGGCACAAATAGCGTCGGATGGGCG | SEQ ID NO: 80 |
| Streptococcus | GTGATCACTGATGAATATAAGGTTCCGTCTAAAAAGTTCAAGGTTCTGGGAAATACA | |
| pyogenes | GACCGCCACAGTATCAAAAAAAATCTTATAGGGGCTCTTTTATTTGACAGTGGAGAG | |
| M1GAS wild | ACAGCGGAAGCGACTCGTCTCAAACGGACAGCTCGTAGAAGGTATACACGTCGGAAG | |
| type | AATCGTATTTGTTATCTACAGGAGATTTTTTCAAATGAGATGGCGAAAGTAGATGAT | |
| NC_002737.2 | AGTTTCTTTCATCGACTTGAAGAGTCTTTTTTGGTGGAAGAAGACAAGAAGCATGAA | |
| | CGTCATCCTATTTTTGGAAATATAGTAGATGAAGTTGCTTATCATGAGAAATATCCA | |
| | ACTATCTATCATCTGCGAAAAAAATTGGTAGATTCTACTGATAAAGCGGATTTGCGC | |
| | TTAATCTATTTGGCCTTAGCGCATATGATTAAGTTTCGTGGTCATTTTTTGATTGAG | |
| | GGAGATTTAAATCCTGATAATAGTGATGTGGACAAACTATTTATCCAGTTGGTACAA | |
| | ACCTACAATCAATTATTTGAAGAAAACCCTATTAACGCAAGTGGAGTAGATGCTAAA | |
| | GCGATTCTTTCTGCACGATTGAGTAAATCAAGACGATTAGAAAATCTCATTGCTCAG | |
| | CTCCCCGGTGAGAAGAAAAATGGCTTATTTGGGAATCTCATTGCTTTGTCATTGGGT | |
| | TTGACCCCTAATTTTAAATCAAATTTTGATTTGGCAGAAGATGCTAAATTACAGCTT | |
| | TCAAAAGATACTTACGATGATGATTTAGATAATTTATTGGCGCAAATTGGAGATCAA | |
| | TATGCTGATTTGTTTTTGGCAGCTAAGAATTTATCAGATGCTATTTTACTTTCAGAT | |
| | ATCCTAAGAGTAAATACTGAAATAACTAAGGCTCCCCTATCAGCTTCAATGATTAAA | |
| | CGCTACGATGAACATCATCAAGACTTGACTCTTTTAAAAGCTTTAGTTCGACAACAA | |
| | CTTCCAGAAAAGTATAAAGAAATCTTTTTTGATCAATCAAAAAACGGATATGCAGGT | |
| | TATATTGATGGGGGAGCTAGCCAAGAAGAATTTTATAAATTTATCAAACCAATTTTA | |
| | GAAAAAATGGATGGTACTGAGGAATTATTGGTGAAACTAAATCGTGAAGATTTGCTG | |
| | CGCAAGCAACGGACCTTTGACAACGGCTCTATTCCCCATCAAATTCACTTGGGTGAG | |
| | CTGCATGCTATTTTGAGAAGACAAGAAGACTTTTATCCATTTTTAAAAGACAATCGT | |
| | GAGAAGATTGAAAAAATCTTGACTTTTCGAATTCCTTATTATGTTGGTCCATTGGCG | |
| | CGTGGCAATAGTCGTTTTGCATGGATGACTCGGAAGTCTGAAGAAACAATTACCCCA | |
| | TGGAATTTTGAAGAAGTTGTCGATAAAGGTGCTTCAGCTCAATCATTTATTGAACGC | |
| | ATGACAAACTTTGATAAAAATCTTCCAAATGAAAAAGTACTACCAAAACATAGTTTG | |
| | CTTTATGAGTATTTTACGGTTTATAACGAATTGACAAAGGTCAAATATGTTACTGAA | |
| | GGAATGCGAAAACCAGCATTTCTTTCAGGTGAACAGAAGAAAGCCATTGTTGATTTA | |
| | CTCTTCAAAACAAATCGAAAAGTAACCGTTAAGCAATTAAAAGAAGATTATTTCAAA | |
| | AAAATAGAATGTTTTGATAGTGTTGAAATTTCAGGAGTTGAAGATAGATTTAATGCT | |
| | TCATTAGGTACCTACCATGATTTGCTAAAAATTATTAAAGATAAAGATTTTTTGGAT | |
| | AATGAAGAAAATGAAGATATCTTAGAGGATATTGTTTTAACATTGACCTTATTTGAA | |
| | GATAGGGAGATGATTGAGGAAAGACTTAAAACATATGCTCACCTCTTTGATGATAAG | |
| | GTGATGAAACAGCTTAAACGTCGCCGTTATACTGGTTGGGGACGTTTGTCTCGAAAA | |
| | TTGATTAATGGTATTAGGGATAAGCAATCTGGCAAAACAATATTAGATTTTTTGAAA | |
| | TCAGATGGTTTTGCCAATCGCAATTTTATGCAGCTGATCCATGATGATAGTTTGACA | |
| | TTTAAAGAAGACATTCAAAAAGCACAAGTGTCTGGACAAGGCGATAGTTTACATGAA | |
| | CATATTGCAAATTTAGCTGGTAGCCCTGCTATTAAAAAAGGTATTTTACAGACTGTA | |
| | AAAGTTGTTGATGAATTGGTCAAAGTAATGGGGCGGCATAAGCCAGAAAATATCGTT | |
| | ATTGAAATGGCACGTGAAAATCAGACAACTCAAAAGGGCCAGAAAAATTCGCGAGAG | |
| | CGTATGAAACGAATCGAAGAAGGTATCAAAGAATTAGGAAGTCAGATTCTTAAAGAG | |
| | CATCCTGTTGAAAATACTCAATTGCAAAATGAAAAGCTCTATCTCTATTATCTCCAA | |
| | AATGGAAGAGACATGTATGTGGACCAAGAATTAGATATTAATCGTTTAAGTGATTAT | |
| | GATGTCGATCACATTGTTCCACAAAGTTTCCTTAAAGACGATTCAATAGACAATAAG | |
| | GTCTTAACGCGTTCTGATAAAAATCGTGGTAAATCGGATAACGTTCCAAGTGAAGAA | |
| | GTAGTCAAAAAGATGAAAAACTATTGGAGACAACTTCTAAACGCCAAGTTAATCACT | |
| | CAACGTAAGTTTGATAATTTAACGAAAGCTGAACGTGGAGGTTTGAGTGAACTTGAT | |
| | AAAGCTGGTTTTATCAAACGCCAATTGGTTGAAACTCGCCAAATCACTAAGCATGTG | |
| | GCACAAATTTTGGATAGTCGCATGAATACTAAATACGATGAAAATGATAAACTTATT | |
| | CGAGAGGTTAAAGTGATTACCTTAAAATCTAAATTAGTTTCTGACTTCCGAAAAGAT | |
| | TTCCAATTCTATAAAGTACGTGAGATTAACAATTACCATCATGCCCATGATGCGTAT | |
| | CTAAATGCCGTCGTTGGAACTGCTTTGATTAAGAAATATCCAAAACTTGAATCGGAG | |
| | TTTGTCTATGGTGATTATAAAGTTTATGATGTTCGTAAAATGATTGCTAAGTCTGAG | |
| | CAAGAAATAGGCAAAGCAACCGCAAAATATTTCTTTTACTCTAATATCATGAACTTC | |
| | TTCAAAACAGAAATTACACTTGCAAATGGAGAGATTCGCAAACGCCCTCTAATCGAA | |
| | ACTAATGGGGAAACTGGAGAAATTGTCTGGGATAAAGGGCGAGATTTTGCCACAGTG | |
| | CGCAAAGTATTGTCCATGCCCCAAGTCAATATTGTCAAGAAAACAGAAGTACAGACA | |
| | GGCGGATTCTCCAAGGAGTCAATTTTACCAAAAAGAAATTCGGACAAGCTTATTGCT | |
| | CGTAAAAAAGACTGGGATCCAAAAAAATATGGTGGTTTTGATAGTCCAACGGTAGCT | |
| | TATTCAGTCCTAGTGGTTGCTAAGGTGGAAAAAGGGAAATCGAAGAAGTTAAAATCC | |
| | GTTAAAGAGTTACTAGGGATCACAATTATGGAAAGAAGTTCCTTTGAAAAAAATCCG | |
| | ATTGACTTTTTAGAAGCTAAAGGATATAAGGAAGTTAAAAAAGACTTAATCATTAAA | |
| | CTACCTAAATATAGTCTTTTTGAGTTAGAAAACGGTCGTAAACGGATGCTGGCTAGT | |
| | GCCGGAGAATTACAAAAAGGAAATGAGCTGGCTCTGCCAAGCAAATATGTGAATTTT | |
| | TTATATTTAGCTAGTCATTATGAAAAGTTGAAGGGTAGTCCAGAAGATAACGAACAA | |
| | AAACAATTGTTTGTGGAGCAGCATAAGCATTATTTAGATGAGATTATTGAGCAAATC | |
| | AGTGAATTTTCTAAGCGTGTTATTTTAGCAGATGCCAATTTAGATAAAGTTCTTAGT | |
| | GCATATAACAAACATAGAGACAAACCAATACGTGAACAAGCAGAAAATATTATTCAT | |
| | TTATTTACGTTGACGAATCTTGGAGCTCCCGCTGCTTTTAAATATTTTGATACAACA | |
| | ATTGATCGTAAACGATATACGTCTACAAAAGAAGTTTTAGATGCCACTCTTATCCAT | |
| | CAATCCATCACTGGTCTTTATGAAACACGCATTGATTTGAGTCAGCTAGGAGGTGAC | |
| | TGA | |
| SpCas9 | MDKKYSIGLDIGTNSVGWAVITDEYKVPSKKFKVLGNTDRHSIKKNLIGALLFDSGE | SEQ ID NO: 81 |
| Streptococcus | TAEATRLKRTARRRYTRRKNRICYLQEIFSNEMAKVDDSFFHRLEESFLVEEDKKHE | |
| pyogenes | RHPIFGNIVDEVAYHEKYPTIYHLRKKLVDSTDKADLRLIYLALAHMIKFRGHFLIE | |
| M1GAS wild | GDLNPDNSDVDKLFIQLVQTYNQLFEENPINASGVDAKAILSARLSKSRRLENLIAQ | |
| type | LPGEKKNGLFGNLIALSLGLTPNFKSNFDLAEDAKLQLSKDTYDDDLDNLLAQIGDQ | |
| Encoded | YADLFLAAKNLSDAILLSDILRVNTEITKAPLSASMIKRYDEHHQDLTLLKALVRQQ | |
| product of | LPEKYKEIFFDQSKNGYAGYIDGGASQEEFYKFIKPILEKMDGTEELLVKLNREDLL | |
| NC_002737.2 | RKQRTFDNGSIPHQIHLGELHAILRRQEDFYPFLKDNREKIEKILTFRIPYYVGPLA | |
| (100% | RGNSRFAWMTRKSEETITPWNFEEVVDKGASAQSFIERMTNFDKNLPNEKVLPKHSL | |
| identical to | LYEYFTVYNELTKVKYVTEGMRKPAFLSGEQKKAIVDLLFKTNRKVTVKQLKEDYFK | |
| the | KIECFDSVEISGVEDRFNASLGTYHDLLKIIKDKDFLDNEENEDILEDIVLTLTLFE | |
| canonical | DREMIEERLKTYAHLFDDKVMKQLKRRRYTGWGRLSRKLINGIRDKQSGKTILDFLK | |
| Q99ZW2 | SDGFANRNFMQLIHDDSLTFKEDIQKAQVSGQGDSLHEHIANLAGSPAIKKGILQTV | |
| wild type) | KVVDELVKVMGRHKPENIVIEMARENQTTQKGQKNSRERMKRIEEGIKELGSQILKE | |
| | HPVENTQLQNEKLYLYYLQNGRDMYVDQELDINRLSDYDVDHIVPQSFLKDDSIDNK | |
| | VLTRSDKNRGKSDNVPSEEVVKKMKNYWRQLLNAKLITQRKFDNLTKAERGGLSELD | |
| | KAGFIKRQLVETRQITKHVAQILDSRMNTKYDENDKLIREVKVITLKSKLVSDFRKD | |
| | FQFYKVREINNYHHAHDAYLNAVVGTALIKKYPKLESEFVYGDYKVYDVRKMIAKSE | |
| | QEIGKATAKYFFYSNIMNFFKTEITLANGEIRKRPLIETNGETGEIVWDKGRDFATV | |
| | RKVLSMPQVNIVKKTEVQTGGFSKESILPKRNSDKLIARKKDWDPKKYGGFDSPTVA | |
| | YSVLVVAKVEKGKSKKLKSVKELLGITIMERSSFEKNPIDFLEAKGYKEVKKDLIIK | |
| | LPKYSLFELENGRKRMLASAGELQKGNELALPSKYVNFLYLASHYEKLKGSPEDNEQ | |
| | KQLFVEQHKHYLDEIIEQISEFSKRVILADANLDKVLSAYNKHRDKPIREQAENIIH | |
| | LFTLTNLGAPAAFKYFDTTIDRKRYTSTKEVLDATLIHQSITGLYETRIDLSQLGGD | |

[0142] The base editors described herein may include any of the above SpCas9 sequences, or any variant thereof having at least 80%, at least 85%, at least 90%, at least 95%, or at least 99% sequence identity thereto.

[0143] (ii) Wild Type Cas9 Orthologs

[0144] In other embodiments, the Cas9 protein can be a wild type Cas9 ortholog from another bacterial species different from the canonical Cas9 from S. pyogenes. For example, the following Cas9 orthologs can be used in connection with the base editor constructs described in this specification. In addition, any variant Cas9 orthologs having at least 80%, at least 85%, at least 90%, at least 95%, or at least 99% sequence identity to any of the below orthologs may also be used with the present base editors.

| Description | Sequence |
|---|---|
| LfCas 9 | MKEYHIGLDIGTSSIGWAVTDSQFKLMRIKGKTAIGVRLFEEGKTAAERRTFRTTRRRLKRRKWRLHYLDEI |
| Lactobacillus | FAPHLQEVDENFLRRLKQSNIHPEDPTKNQAFIGKLLFPDLLKKNERGYPTLIKMRDELPVEQRAHYPVMNI |
| fermentum | YKLREAMINEDRQFDLREVYLAVHHIVKYRGHFLNNASVDKFKVGRIDFDKSFNVLNEAYEELQNGEGSFTI |
| wild type | EPSKVEKIGQLLLDTKMRKLDRQKAVAKLLEVKVADKEETKRNKQIATAMSKLVLGYKADFATVAMANGNEW |
| GenBank: | KIDLSSETSEDEIEKFREELSDAQNDILTEITSLFSQIMLNEIVPNGMSISESMMDRYWTHERQLAEVKEYL |
| SNX31424.11 | ATQPASARKEFDQVYNKYIGQAPKERGFDLEKGLKKILSKKENWKEIDELLKAGDFLPKQRTSANGVIPHQM |
| | HQQELDRIIEKQAKYYPWLATENPATGERDRHQAKYELDQLVSFRIPYYVGPLVTPEVQKATSGAKFAWAKR |
| | KEDGEITPWNLWDKIDRAESAEAFIKRMTVKDTYLLNEDVLPANSLLYQKYNVLNELNNVRVNGRRLSVGIK |
| | QDIYTELFKKKKTVKASDVASLVMAKTRGVNKPSVEGLSDPKKFNSNLATYLDLKSIVGDKVDDNRYQTDLE |
| | NIIEWRSVFEDGEIFADKLTEVEWLTDEQRSALVKKRYKGWGRLSKKLLTGIVDENGQRIIDLMWNTDQNFK |
| | EIVDQPVFKEQIDQLNQKAITNDGMTLRERVESVLDDAYTSPQNKKAIWQVVRVVEDIVKAVGNAPKSISIE |
| | FARNEGNKGEITRSRRTQLQKLFEDQAHELVKDTSLTEELEKAPDLSDRYYFYFTQGGKDMYTGDPINFDEI |
| | STKYDIDHILPQSFVKDNSLDNRVLTSRKENNKKSDQVPAKLYAAKMKPYWNQLLKQGLITQRKFENLTKDV |
| | DQNIKYRSLGFVKRQLVETRQVIKLTANILGSMYQEAGTEIIETRAGLTKQLREEFDLPKVREVNDYHHAVD |
| | AYLTTFAGQYLNRRYPKLRSFFVYGEYMKFKHGSDLKLRNFNFFHELMEGDKSQGKVVDQQTGELITTRDEV |
| | AKSFDRLLNMKYMLVSKEVHDRSDQLYGATIVTAKESGKLTSPIEIKKNRLVDLYGAYTNGTSAFMTIIKFT |
| | GNKPKYKVIGIPTTSAASLKRAGKPGSESYNQELHRIIKSNPKVKKGFEIVVPHVSYGQLIVDGDCKFTLAS |
| | PTVQHPATQLVLSKKSLETISSGYKILKDKPAIANERLIRVFDEVVGQMNRYFTIFDQRSNRQKVADARDKF |
| | LSLPTESKYEGAKKVQVGKTEVITNLLMGLHANATQGDLKVLGLATFGFFQSTTGLSLSEDTMIVYQSPTGL |
| | FERRICLKDI |
| | (SEQ ID NO: 82) |
| SaCas 9 | MDKKYSIGLDIGTNSVGWAVITDEYKVPSKKFKVLGNTDRHSIKKNLIGALLFDSGETAEATRLKRTARRRY |
| Staphylococcus | TRRKNRICYLQEIFSNEMAKVDDSFFHRLEESFLVEEDKKHERHPIFGNIVDEVAYHEKYPTIYHLRKKLVD |
| aureus | STDKADLRLIYLALAHMIKFRGHFLIEGDLNPDNSDVDKLFIQLVQTYNQLFEENPINASGVDAKAILSARL |
| wild type | SKSRRLENLIAQLPGEKKNGLFGNLIALSLGLTPNFKSNFDLAEDAKLQLSKDTYDDDLDNLLAQIGDQYAD |
| GenBank: | LFLAAKNLSDAILLSDILRVNTEITKAPLSASMIKRYDEHHQDLTLLKALVRQQLPEKYKEIFFDQSKNGYA |
| AYD60528.1 | GYIDGGASQEEFYKFIKPILEKMDGTEELLVKLNREDLLRKQRTFDNGSIPHQIHLGELHAILRRQEDFYPF |
| | LKDNREKIEKILTFRIPYYVGPLARGNSRFAWMTRKSEETITPWNFEEVVDKGASAQSFIERMTNFDKNLPN |
| | EKVLPKHSLLYEYFTVYNELTKVKYVTEGMRKPAFLSGEQKKAIVDLLFKTNRKVTVKQLKEDYFKKIECFD |
| | SVEISGVEDRFNASLGTYHDLLKIIKDKDFLDNEENEDILEDIVLTLTLFEDREMIEERLKTYAHLFDDKVM |
| | KQLKRRRYTGWGRLSRKLINGIRDKQSGKTILDFLKSDGFANRNFMQLIHDDSLTFKEDIQKAQVSGQGDSL |
| | HEHIANLAGSPAIKKGILQTVKVVDELVKVMGRHKPENIVIEMARENQTTQKGQKNSRERMKRIEEGIKELG |
| | SQILKEHPVENTQLQNEKLYLYYLQNGRDMYVDQELDINRLSDYDVDHIVPQSFLKDDSIDNKVLTRSDKNR |
| | GKSDNVPSEEVVKKMKNYWRQLLNAKLITQRKFDNLTKAERGGLSELDKAGFIKRQLVETRQITKHVAQILD |
| | SRMNTKYDENDKLIREVKVITLKSKLVSDFRKDFQFYKVREINNYHHAHDAYLNAVVGTALIKKYPKLESEF |
| | VYGDYKVYDVRKMIAKSEQEIGKATAKYFFYSNIMNFFKTEITLANGEIRKRPLIETNGETGEIVWDKGRDF |
| | ATVRKVLSMPQVNIVKKTEVQTGGFSKESILPKRNSDKLIARKKDWDPKKYGGFDSPTVAYSVLVVAKVEKG |
| | KSKKLKSVKELLGITIMERSSFEKNPIDFLEAKGYKEVKKDLIIKLPKYSLFELENGRKRMLASAGELQKGN |
| | ELALPSKYVNFLYLASHYEKLKGSPEDNEQKQLFVEQHKHYLDEIIEQISEFSKRVILADANLDKVLSAYNK |
| | HRDKPIREQAENIIHLFTLTNLGAPAAFKYFDTTIDRKRYTSTKEVLDATLIHQSITGLYETRIDLSQLGGD |
| | (SEQ ID NO: 83) |
| SaCas 9 | MGKRNYILGLDIGITSVGYGIIDYETRDVIDAGVRLFKEANVENNEGRRSKRGARRLKRRRRHRIQRVKKLL |
| Staphylococcus | FDYNLLTDHSELSGINPYEARVKGLSQKLSEEEFSAALLHLAKRRGVHNVNEVEEDTGNELSTKEQISRNSK |
| aureus | ALEEKYVAELQLERLKKDGEVRGSINRFKTSDYVKEAKQLLKVQKAYHQLDQSFIDTYIDLLETRRTYYEGP |
| | GEGSPFGWKDIKEWYEMLMGHCTYFPEELRSVKYAYNADLYNALNDLNNLVITRDENEKLEYYEKFQIIENV |
| | FKQKKKPTLKQIAKEILVNEEDIKGYRVTSTGKPEFTNLKVYHDIKDITARKEIIENAELLDQIAKILTIYQ |
| | SSEDIQEELTNLNSELTQEEIEQISNLKGYTGTHNLSLKAINLILDELWHTNDNQIAIFNRLKLVPKKVDLS |
| | QQKEIPTTLVDDFILSPVVKRSFIQSIKVINAIIKKYGLPNDIIIELAREKNSKDAQKMINEMQKRNRQTNE |
| | RIEEIIRTTGKENAKYLIEKIKLHDMQEGKCLYSLEAIPLEDLLNNPFNYEVDHIIPRSVSFDNSFNNKVLV |
| | KQEENSKKGNRTPFQYLSSSDSKISYETFKKHILNLAKGKGRISKTKKEYLLEERDINRFSVQKDFINRNLV |
| | DTRYATRGLMNLLRSYFRVNNLDVKVKSINGGFTSFLRRKWKFKKERNKGYKHHAEDALIIANADFIFKEWK |
| | KLDKAKKVMENQMFEEKQAESMPEIETEQEYKEIFITPHQIKHIKDFKDYKYSHRVDKKPNRKLINDTLYST |
| | RKDDKGNTLIVNNLNGLYDKDNDKLKKLINKSPEKLLMYHHDPQTYQKLKLIMEQYGDEKNPLYKYYEETGN |
| | YLTKYSKKDNGPVIKKIKYYGNKLNAHLDITDDYPNSRNKVVKLSLKPYRFDVYLDNGVYKFVTVKNLDVIK |
| | KENYYEVNSKCYEEAKKLKKISNQAEFIASFYKNDLIKINGELYRVIGVNNDLLNRIEVNMIDITYREYLEN |
| | MNDKRPPHIIKTIASKTQSIKKYSTDILGNLYEVKSKKHPQIIKK |
| | (SEQ ID NO: 84) |
| StCas9 | MLFNKCIIISINLDFSNKEKCMTKPYSIGLDIGTNSVGWAVITDNYKVPSKKMKVLGNTSKKYIKKNLLGVL |
| Streptococcus | LFDSGITAEGRRLKRTARRRYTRRRNRILYLQEIFSTEMATLDDAFFQRLDDSFLVPDDKRDSKYPIFGNLV |
| thermophilus | EEKVYHDEFPTIYHLRKYLADSTKKADLRLVYLALAHMIKYRGHFLIEGEFNSKNNDIQKNFQDFLDTYNAI |
| UniProtKB/ | FESDLSLENSKQLEEIVKDKISKLEKKDRILKLFPGEKNSGIFSEFLKLIVGNQADFRKCFNLDEKASLHFS |
| Swiss-Prot: | KESYDEDLETLLGYIGDDYSDVFLKAKKLYDAILLSGFLTVTDNETEAPLSSAMIKRYNEHKEDLALLKEYI |
| G3ECR1.2 | RNISLKTYNEVFKDDTKNGYAGYIDGKTNQEDFYVYLKNLLAEFEGADYFLEKIDREDFLRKQRTFDNGSIP |
| Wild type | YQIHLQEMRAILDKQAKFYPFLAKNKERIEKILTFRIPYYVGPLARGNSDFAWSIRKRNEKITPWNFEDVID |
| | KESSAEAFINRMTSFDLYLPEEKVLPKHSLLYETFNVYNELTKVRFIAESMRDYQFLDSKQKKDIVRLYFKD |
| | KRKVTDKDIIEYLHAIYGYDGIELKGIEKQFNSSLSTYHDLLNIINDKEFLDDSSNEAIIEEIIHTLTIFED |
| | REMIKQRLSKFENIFDKSVLKKLSRRHYTGWGKLSAKLINGIRDEKSGNTILDYLIDDGISNRNFMQLIHDD |
| | ALSFKKKIQKAQIIGDEDKGNIKEVVKSLPGSPAIKKGILQSIKIVDELVKVMGGRKPESIVVEMARENQYT |
| | NQGKSNSQQRLKRLEKSLKELGSKILKENIPAKLSKIDNNALQNDRLYLYYLQNGKDMYTGDDLDIDRLSNY |
| | DIDHIIPQAFLKDNSIDNKVLVSSASNRGKSDDFPSLEVVKKRKTFWYQLLKSKLISQRKFDNLTKAERGGL |
| | LPEDKAGFIQRQLVETRQITKHVARLLDEKFNNKKDENNRAVRTVKIITLKSTLVSQFRKDFELYKVREIND |
| | FHHAHDAYLNAVIASALLKKYPKLEPEFVYGDYPKYNSFRERKSATEKVYFYSNIMNIFKKSISLADGRVIE |
| | RPLIEVNEETGESVWNKESDLATVRRVLSYPQVNVVKKVEEQNHGLDRGKPKGLFNANLSSKPKPNSNENLV |
| | GAKEYLDPKKYGGYAGISNSFAVLVKGTIEKGAKKKITNVLEFQGISILDRINYRKDKLNFLLEKGYKDIEL |
| | IIELPKYSLFELSDGSRRMLASILSTNNKRGEIHKGNQIFLSQKFVKLLYHAKRISNTINENHRKYVENHKK |
| | EFEELFYYILEFNENYVGAKKNGKLLNSAFQSWQNHSIDELCSSFIGPTGSERKGLFELTSRGSAADFEFLG |
| | VKIPRYRDYTPSSLLKDATLIHQSVTGLYETRIDLAKLGEG |
| | (SEQ ID NO: 85) |
| LcCas 9 | MKIKNYNLALTPSTSAVGHVEVDDDLNILEPVHHQKAIGVAKFGEGETAEARRLARSARRTTKRRANRINHY |
| Lactobacillus | FNEIMKPEIDKVDPLMFDRIKQAGLSPLDERKEFRTVIFDRPNIASYYHNQFPTIWHLQKYLMITDEKADIR |
| crispatus | LIYWALHSLLKHRGHFFNTTPMSQFKPGKLNLKDDMLALDDYNDLEGLSFAVANSPEIEKVIKDRSMHKKEK |
| NCBI | IAELKKLIVNDVPDKDLAKRNNKIITQIVNAIMGNSFHLNFIFDMDLDKLTSKAWSFKLDDPELDTKFDAIS |
| Reference | GSMTDNQIGIFETLQKIYSAISLLDILNGSSNVVDAKNALYDKHKRDLNLYFKFLNTLPDEIAKTLKAGYTL |
| Sequence: | YIGNRKKDLLAARKLLKVNVAKNFSQDDFYKLINKELKSIDKQGLQTRFSEKVGELVAQNNFLPVQRSSDNV |
| WP_133478044.1 | FIPYQLNAITFNKILENQGKYYDFLVKPNPAKKDRKNAPYELSQLMQFTIPYYVGPLVTPEEQVKSGIPKTS |
| Wild type | RFAWMVRKDNGAITPWNFYDKVDIEATADKFIKRSIAKDSYLLSELVLPKHSLLYEKYEVFNELSNVSLDGK |
| | KLSGGVKQILFNEVFKKTNKVNTSRILKALAKHNIPGSKITGLSNPEEFTSSLQTYNAWKKYFPNQIDNFAY |
| | QQDLEKMIEWSTVFEDHKILAKKLDEIEWLDDDQKKFVANTRLRGWGRLSKRLLTGLKDNYGKSIMQRLETT |
| | KANFQQIVYKPEFREQIDKISQAAAKNQSLEDILANSYTSPSNRKAIRKTMSVVDEYIKLNHGKEPDKIFLM |
| | FQRSEQEKGKQTEARSKQLNRILSQLKADKSANKLFSKQLADEFSNAIKKSKYKLNDKQYFYFQQLGRDALT |
| | GEVIDYDELYKYTVLHIIPRSKLTDDSQNNKVLTKYKIVDGSVALKFGNSYSDALGMPIKAFWTELNRLKLI |
| | PKGKLLNLTTDFSTLNKYQRDGYIARQLVETQQIVKLLATIMQSRFKHTKIIEVRNSQVANIRYQFDYFRIK |
| | NLNEYYRGFDAYLAAVVGTYLYKVYPKARRLFVYGQYLKPKKTNQENQDMHLDSEKKSQGFNFLWNLLYGKQ |
| | DQIFVNGTDVIAFNRKDLITKMNTVYNYKSQKISLAIDYHNGAMFKATLFPRNDRDTAKTRKLIPKKKDYDT |
| | DIYGGYTSNVDGYMLLAEIIKRDGNKQYGFYGVPSRLVSELDTLKKTRYTEYEEKLKEIIKPELGVDLKKIK |
| | KIKILKNKVPFNQVIIDKGSKFFITSTSYRWNYRQLILSAESQQTLMDLVVDPDFSNHKARKDARKNADERL |
| | IKVYEEILYQVKNYMPMFVELHRCYEKLVDAQKTFKSLKISDKAMVLNQILILLHSNATSPVLEKLGYHTRF |
| | TLGKKHNLISENAVLVTQSITGLKENHVSIKQML |
| | (SEQ ID NO: 86) |
| PdCas9 | MTNEKYSIGLDIGTSSIGFAVVNDNNRVIRVKGKNAIGVRLFDEGKAAADRRSFRTTRRSFRTTRRRLSRRR |
| Pedicoccus | WRLKLLREIFDAYITPVDEAFFIRLKESNLSPKDSKKQYSGDILFNDRSDKDFYEKYPTIYHLRNALMTEHR |
| damnosus | KFDVREIYLAIHHIMKFRGHFLNATPANNFKVGRLNLEEKFEELNDIYQRVFPDESIEFRTDNLEQIKEVLL |
| NCBI | DNKRSRADRQRTLVSDIYQSSEDKDIEKRNKAVATEILKASLGNKAKLNVITNVEVDKEAAKEWSITFDSES |
| Reference | IDDDLAKIEGQMTDDGHEIIEVLRSLYSGITLSAIVPENHTLSQSMVAKYDLHKDHLKLFKKLINGMTDTKK |
| Sequence: | AKNLRAAYDGYIDGVKGKVLPQEDFYKQVQVNLDDSAEANEIQTYIDQDIFMPKQRTKANGSIPHQLQQQEL |
| WP_062913273.1 | DQIIENQKAYYPWLAELNPNPDKKRQQLAKYKLDELVTFRVPYYVGPMITAKDQKNQSGAEFAWMIRKEPGN |
| Wild type | ITPWNFDQKVDRMATANQFIKRMTTTDTYLLGEDVLPAQSLLYQKFEVLNELNKIRIDHKPISIEQKQQIFN |
| | DLFKQFKNVTIKHLQDYLVSQGQYSKRPLIEGLADEKRFNSSLSTYSDLCGIFGAKLVEENDRQEDLEKIIE |
| | WSTIFEDKKIYRAKLNDLTWLTDDQKEKLATKRYQGWGRLSRKLLVGLKNSEHRNIMDILWITNENFMQIQA |
| | EPDFAKLVTDANKGMLEKTDSQDVINDLYTSPQNKKAIRQILLVVHDIQNAMHGQAPAKIHVEFARGEERNP |
| | RRSVQRQRQVEAAYEKVSNELVSAKVRQEFKEAINNKRDFKDRLFLYFMQGGIDIYTGKQLNIDQLSSYQID |
| | HILPQAFVKDDSLTNRVLTNENQVKADSVPIDIFGKKMLSVWGRMKDQGLISKGKYRNLTMNPENISAHTEN |
| | GFINRQLVETRQVIKLAVNILADEYGDSTQIISVKADLSHQMREDFELLKNRDVNDYHHAFDAYLAAFIGNY |
| | LLKRYPKLESYFVYGDFKKFTQKETKMRRFNFIYDLKHCDQVVNKETGEILWTKDEDIKYIRHLFAYKKILV |
| | SHEVREKRGALYNQTIYKAKDDKGSGQESKKLIRIKDDKETKIYGGYSGKSLAYMTIVQITKKNKVSYRVIG |
| | IPTLALARLNKLENDSTENNGELYKIIKPQFTHYKVDKKNGEIIETTDDFKIVVSKVRFQQLIDDAGQFFML |
| | ASDTYKNNAQQLVISNNALKAINNTNITDCPRDDLERLDNLRLDSAFDEIVKKMDKYFSAYDANNFREKIRN |
| | SNLIFYQLPVEDQWENNKITELGKRTVLTRILQGLHANATTTDMSIFKIKTPFGQLRQRSGISLSENAQLIY |
| | QSPTGLFERRVQLNKIK |
| | (SEQ ID NO: 87) |
| FnCas9 | MKKQKFSDYYLGFDIGTNSVGWCVTDLDYNVLRFNKKDMWGSRLFEEAKTAAERRVQRNSRRRLKRRKWRLN |
| Fusobaterium | LLEEIFSNEILKIDSNFFRRLKESSLWLEDKSSKEKFTLFNDDNYKDYDFYKQYPTIFHLRNELIKNPEKKD |
| nucleatum | IRLVYLAIHSIFKSRGHFLFEGQNLKEIKNFETLYNNLIAFLEDNGINKIIDKNNIEKLEKIVCDSKKGLKD |
| NCBI | KEKEFKEIFNSDKQLVAIFKLSVGSSVSLNDLFDTDEYKKGEVEKEKISFREQIYEDDKPIYYSILGEKIEL |
| Reference | LDIAKTFYDFMVLNNILADSQYISEAKVKLYEEHKKDLKNLKYIIRKYNKGNYDKLFKDKNENNYSAYIGLN |
| Sequence: | KEKSKKEVIEKSRLKIDDLIKNIKGYLPKVEEIEEKDKAIFNKILNKIELKTILPKQRISDNGTLPYQIHEA |
| WP_060798984.1 | ELEKILENQSKYYDFLNYEENGIITKDKLLMTFKFRIPYYVGPLNSYHKDKGGNSWIVRKEEGKILPWNFEQ |
| | KVDIEKSAEEFIKRMTNKCTYLNGEDVIPKDTFLYSEYVILNELNKVQVNDEFLNEENKRKIIDELFKENKK |
| | VSEKKFKEYLLVKQIVDGTIELKGVKDSFNSNYISYIRFKDIFGEKLNLDIYKEISEKSILWKCLYGDDKKI |
| | FEKKIKNEYGDILTKDEIKKINTFKFNNWGRLSEKLLTGIEFINLETGECYSSVMDALRRTNYNLMELLSSK |
| | FTLQESINNENKEMNEASYRDLIEESYVSPSLKRAIFQTLKIYEEIRKITGRVPKKVFIEMARGGDESMKNK |
| | KIPARQEQLKKLYDSCGNDIANFSIDIKEMKNSLISYDNNSLRQKKLYLYYLQFGKCMYTGREIDLDRLLQN |
| | NDTYDIDHIYPRSKVIKDDSFDNLVLVLKNENAEKSNEYPVKKEIQEKMKSFWRFLKEKNFISDEKYKRLTG |
| | KDDFELRGFMARQLVNVRQTTKEVGKILQQIEPEIKIVYSKAEIASSFREMFDFIKVRELNDTHHAKDAYLN |
| | IVAGNVYNTKFTEKPYRYLQEIKENYDVKKIYNYDIKNAWDKENSLEIVKKNMEKNTVNITRFIKEKKGQLF |
| | DLNPIKKGETSNEIISIKPKVYNGKDDKLNEKYGYYKSLNPAYFLYVEHKEKNKRIKSFERVNLVDVNNIKD |
| | EKSLVKYLIENKKLVEPRVIKKVYKRQVILINDYPYSIVTLDSNKLMDFENLKPLFLENKYEKILKNVIKFL |
| | EDNQGKSEENYKFIYLKKKDRYEKNETLESVKDRYNLEFNEMYDKFLEKLDSKDYKNYMNNKKYQELLDVKE |
| | KFIKLNLFDKAFTLKSFLDLFNRKTMADFSKVGLTKYLGKIQKISSNVLSKNELYLLEESVTGLFVKKIKL |
| | (SEQ ID NO: 88) |
| EcCas9 | RRKQRIQILQELLGEEVLKTDPGFFHRMKESRYVVEDKRTLDGKQVELPYALFVDKDYTDKEYYKQFPTINH |
| Enterococcus | LIVYLMTTSDTPDIRLVYLALHYYMKNRGNFLHSGDINNVKDINDILEQLDNVLETFLDGWNLKLKSYVEDI |
| cecorum | KNIYNRDLGRGERKKAFVNTLGAKTKAEKAFCSLISGGSTNLAELFDDSSLKEIETPKIEFASSSLEDKIDG |
| NCBI | IQEALEDRFAVIEAAKRLYDWKTLTDILGDSSSLAEARVNSYQMHHEQLLELKSLVKEYLDRKVFQEVFVSL |
| Reference | NVANNYPAYIGHTKINGKKKELEVKRTKRNDFYSYVKKQVIEPIKKKVSDEAVLTKLSEIESLIEVDKYLPL |
| Sequence: | QVNSDNGVIPYQVKLNELTRIFDNLENRIPVLRENRDKIIKTFKFRIPYYVGSLNGVVKNGKCTNWMVRKEE |
| WP_047338501.1 | GKIYPWNFEDKVDLEASAEQFIRRMTNKCTYLVNEDVLPKYSLLYSKYLVLSELNNLRIDGRPLDVKIKQDI |
| Wild type | YENVFKKNRKVTLKKIKKYLLKEGIITDDDELSGLADDVKSSLTAYRDFKEKLGHLDLSEAQMENIILNITL |
| | FGDDKKLLKKRLAALYPFIDDKSLNRIATLNYRDWGRLSERFLSGITSVDQETGELRTIIQCMYETQANLMQ |
| | LLAEPYHFVEAIEKENPKVDLESISYRIVNDLYVSPAVKRQIWQTLLVIKDIKQVMKHDPERIFIEMAREKQ |
| | ESKKTKSRKQVLSEVYKKAKEYEHLFEKLNSLTEEQLRSKKIYLYFTQLGKCMYSGEPIDFENLVSANSNYD |
| | IDHIYPQSKTIDDSFNNIVLVKKSLNAYKSNHYPIDKNIRDNEKVKTLWNTLVSKGLITKEKYERLIRSTPF |
| | SDEELAGFIARQLVETRQSTKAVAEILSNWFPESEIVYSKAKNVSNFRQDFEILKVRELNDCHHAHDAYLNI |
| | VVGNAYHTKFTNSPYRFIKNKANQEYNLRKLLQKVNKIESNGVVAWVGQSENNPGTIATVKKVIRRNTVLIS |
| | RMVKEVDGQLFDLTLMKKGKGQVPIKSSDERLTDISKYGGYNKATGAYFTFVKSKKRGKVVRSFEYVPLHLS |
| | KQFENNNELLKEYIEKDRGLTDVEILIPKVLINSLFRYNGSLVRITGRGDTRLLLVHEQPLYVSNSFVQQLK |
| | SVSSYKLKKSENDNAKLTKTATEKLSNIDELYDGLLRKLDLPIYSYWFSSIKEYLVESRTKYIKLSIEEKAL |
| | VIFEILHLFQSDAQVPNLKILGLSTKPSRIRIQKNLKDTDKMSIIHQSPSGIFEHEIELTSL |
| | (SEQ ID NO: 89) |
| AhCas9 | MQNGFLGITVSSEQVGWAVTNPKYELERASRKDLWGVRLFDKAETAEDRRMFRTNRRLNQRKKNRIHYLRDI |
| Anaerostipes | FHEEVNQKDPNFFQQLDESNFCEDDRTVEFNFDTNLYKNQFPTVYHLRKYLMETKDKPDIRLVYLAFSKFMK |
| hadrus | NRGHFLYKGNLGEVMDFENSMKGFCESLEKFNIDFPTLSDEQVKEVRDILCDHKIAKTVKKKNIITITKVKS |
| NCBI | KTAKAWIGLFCGCSVPVKVLFQDIDEEIVTDPEKISFEDASYDDYIANIEKGVGIYYEAIVSAKMLFDWSIL |
| Reference | NEILGDHQLLSDAMIAEYNKHHDDLKRLQKIIKGTGSRELYQDIFINDVSGNYVCYVGHAKTMSSADQKQFY |
| Sequence: | TFLKNRLKNVNGISSEDAEWIDTEIKNGTLLPKQTKRDNSVIPHQLQLREFELILDNMQEMYPFLKENREKL |
| WP_044924278.1 | LKIFNFVIPYYVGPLKGVVRKGESTNWMVPKKDGVIHPWNFDEMVDKEASAECFISRMTGNCSYLFNEKVLP |
| Wild type | KNSLLYETFEVLNELNPLKINGEPISVELKQRIYEQLFLTGKKVTKKSLTKYLIKNGYDKDIELSGIDNEFH |
| | SNLKSHIDFEDYDNLSDEEVEQIILRITVFEDKQLLKDYLNREFVKLSEDERKQICSLSYKGWGNLSEMLLN |
| | GITVTDSNGVEVSVMDMLWNTNLNLMQILSKKYGYKAEIEHYNKEHEKTIYNREDLMDYLNIPPAQRRKVNQ |
| | LITIVKSLKKTYGVPNKIFFKISREHQDDPKRTSSRKEQLKYLYKSLKSEDEKHLMKELDELNDHELSNDKV |
| | YLYFLQKGRCIYSGKKLNLSRLRKSNYQNDIDYIYPLSAVNDRSMNNKVLTGIQENRADKYTYFPVDSEIQK |
| | KMKGFWMELVLQGFMTKEKYFRLSRENDFSKSELVSFIEREISDNQQSGRMIASVLQYYFPESKIVFVKEKL |
| | ISSFKRDFHLISSYGHNHLQAAKDAYITIVVGNVYHTKFTMDPAIYFKNHKRKDYDLNRLFLENISRDGQIA |
| | WESGPYGSIQTVRKEYAQNHIAVTKRVVEVKGGLFKQMPLKKGHGEYPLKTNDPRFGNIAQYGGYTNVTGSY |
| | FVLVESMEKGKKRISLEYVPVYLHERLEDDPGHKLLKEYLVDHRKLNHPKILLAKVRKNSLLKIDGFYYRLN |
| | GRSGNALILTNAVELIMDDWQTKTANKISGYMKRRAIDKKARVYQNEFHIQELEQLYDFYLDKLKNGVYKNR |
| | KNNQAELIHNEKEQFMELKTEDQCVLLTEIKKLFVCSPMQADLTLIGGSKHTGMIAMSSNVTKADFAVIAED |
| | PLGLRNKVIYSHKGEK (SEQ ID NO: 90) |
| KvCas9 | MSQNNNKIYNIGLDIGDASVGWAVVDEHYNLLKRHGKHMWGSRLFTQANTAVERRSSRSTRRRYNKRRERIR |
| Kandleria | LLREIMEDMVLDVDPTFFIRLANVSFLDQEDKKDYLKENYHSNYNLFIDKDFNDKTYYDKYPTIYHLRKHLC |
| vitulina | ESKEKEDPRLIYLALHHIVKYRGNFLYEGQKFSMDVSNIEDKMIDVLRQFNEINLFEYVEDRKKIDEVLNVL |
| NCBI | KEPLSKKHKAEKAFALFDTTKDNKAAYKELCAALAGNKFNVTKMLKEAELHDEDEKDISFKFSDATFDDAFV |
| Reference | EKQPLLGDCVEFIDLLHDIYSWVELQNILGSAHTSEPSISAAMIQRYEDHKNDLKLLKDVIRKYLPKKYFEV |
| Sequence: | FRDEKSKKNNYCNYINHPSKTPVDEFYKYIKKLIEKIDDPDVKTILNKIELESFMLKQNSRTNGAVPYQMQL |
| WP_031589969.1 | DELNKILENQSVYYSDLKDNEDKIRSILTFRIPYYFGPLNITKDRQFDWIIKKEGKENERILPWNANEIVDV |
| Wild type | DKTADEFIKRMRNFCTYFPDEPVMAKNSLTVSKYEVLNEINKLRINDHLIKRDMKDKMLHTLFMDHKSISAN |
| | AMKKWLVKNQYFSNTDDIKIEGFQKENACSTSLTPWIDFTKIFGKINESNYDFIEKIIYDVTVFEDKKILRR |
| | RLKKEYDLDEEKIKKILKLKYSGWSRLSKKLLSGIKTKYKDSTRTPETVLEVMERTNMNLMQVINDEKLGFK |
| | KTIDDANSTSVSGKFSYAEVQELAGSPAIKRGIWQALLIVDEIKKIMKHEPAHVYIEFARNEDEKERKDSFV |
| | NQMLKLYKDYDFEDETEKEANKHLKGEDAKSKIRSERLKLYYTQMGKCMYTGKSLDIDRLDTYQVDHIVPQS |
| | LLKDDSIDNKVLVLSSENQRKLDDLVIPSSIRNKMYGFWEKLFNNKIISPKKFYSLIKTEFNEKDQERFINR |
| | QIVETRQITKHVAQIIDNHYENTKVVTVRADLSHQFRERYHIYKNRDINDFHHAHDAYIATILGTYIGHRFE |
| | SLDAKYIYGEYKRIFRNQKNKGKEMKKNNDGFILNSMRNIYADKDTGEIVWDPNYIDRIKKCFYYKDCFVTK |
| | KLEENNGTFFNVTVLPNDTNSDKDNTLATVPVNKYRSNVNKYGGFSGVNSFIVAIKGKKKKGKKVIEVNKLT |
| | GIPLMYKNADEEIKINYLKQAEDLEEVQIGKEILKNQLIEKDGGLYYIVAPTEIINAKQLILNESQTKLVCE |
| | IYKAMKYKNYDNLDSEKIIDLYRLLINKMELYYPEYRKQLVKKFEDRYEQLKVISIEEKCNIIKQILATLHC |
| | NSSIGKIMYSDFKISTTIGRLNGRTISLDDISFIAESPTGMYSKKYKL (SEQ ID NO: 91) |
| EfCas9 | MRLFEEGHTAEDRRLKRTARRRISRRRNRLRYLQAFFEEAMTDLDENFFARLQESFLVPEDKKWHRHPIFAK |
| Enterococcus | LEDEVAYHETYPTIYHLRKKLADSSEQADLRLIYLALAHIVKYRGHFLIEGKLSTENTSVKDQFQQFMVIYN |
| faecalis | QTFVNGESRLVSAPLPESVLIEEELTEKASRTKKSEKVLQQFPQEKANGLFGQFLKLMVGNKADFKKVFGLE |
| NCBI | EEAKITYASESYEEDLEGILAKVGDEYSDVFLAAKNVYDAVELSTILADSDKKSHAKLSSSMIVRFTEHQED |
| Reference | LKKFKRFIRENCPDEYDNLFKNEQKDGYAGYIAHAGKVSQLKFYQYVKKIIQDIAGAEYFLEKIAQENFLRK |
| Sequence: | QRTFDNGVIPHQIHLAELQAIIHRQAAYYPFLKENQEKIEQLVTFRIPYYVGPLSKGDASTFAWLKRQSEEP |
| WP_016631044.1 | IRPWNLQETVDLDQSATAFIERMTNFDTYLPSEKVLPKHSLLYEKFMVFNELTKISYTDDRGIKANFSGKEK |
| Wild type | EKIFDYLFKTRRKVKKKDIIQFYRNEYNTEIVTLSGLEEDQFNASFSTYQDLLKCGLTRAELDHPDNAEKLE |
| | DIIKILTIFEDRQRIRTQLSTFKGQFSAEVLKKLERKHYTGWGRLSKKLINGIYDKESGKTILDYLVKDDGV |
| | SKHYNRNFMQLINDSQLSFKNAIQKAQSSEHEETLSETVNELAGSPAIKKGIYQSLKIVDELVAIMGYAPKR |
| | IVVEMARENQTTSTGKRRSIQRLKIVEKAMAEIGSNLLKEQPTTNEQLRDTRLFLYYMQNGKDMYTGDELSL |
| | HRLSHYDIDHIIPQSFMKDDSLDNLVLVGSTENRGKSDDVPSKEVVKDMKAYWEKLYAAGLISQRKFQRLTK |
| | GEQGGLTLEDKAHFIQRQLVETRQITKNVAGILDQRYNAKSKEKKVQIITLKASLTSQFRSIFGLYKVREVN |
| | DYHHGQDAYLNCVVATTLLKVYPNLAPEFVYGEYPKFQTFKENKATAKAIIYTNLLRFFTEDEPRFTKDGEI |
| | LWSNSYLKTIKKELNYHQMNIVKKVEVQKGGFSKESIKPKGPSNKLIPVKNGLDPQKYGGFDSPVVAYTVLF |
| | THEKGKKPLIKQEILGITIMEKTRFEQNPILFLEEKGFLRPRVLMKLPKYTLYEFPEGRRRLLASAKEAQKG |
| | NQMVLPEHLLTLLYHAKQCLLPNQSESLAYVEQHQPEFQEILERVVDFAEVHTLAKSKVQQIVKLFEANQTA |
| | DVKEIAASFIQLMQFNAMGAPSTFKFFQKDIERARYTSIKEIFDATIIYQSPTGLYETRRKVVD (SEQ ID |
| | NO: 92) |
| Staphylococcus | KRNYILGLDIGITSVGYGIIDYETRDVIDAGVRLFKEANVENNEGRRSKRGARRLKRRRRHRIQRVKKLLFD |
| aureus | YNLLTDHSELSGINPYEARVKGLSQKLSEEEFSAALLHLAKRRGVHNVNEVEEDTGNELSTKEQISRNSKAL |
| Cas9 | EEKYVAELQLERLKKDGEVRGSINRFKTSDYVKEAKQLLKVQKAYHQLDQSFIDTYIDLLETRRTYYEGPGE |
| | GSPFGWKDIKEWYEMLMGHCTYFPEELRSVKYAYNADLYNALNDLNNLVITRDENEKLEYYEKFQIIENVFK |
| | QKKKPTLKQIAKEILVNEEDIKGYRVTSTGKPEFTNLKVYHDIKDITARKEIIENAELLDQIAKILTIYQSS |
| | EDIQEELTNLNSELTQEEIEQISNLKGYTGTHNLSLKAINLILDELWHTNDNQIAIFNRLKLVPKKVDLSQQ |
| | KEIPTTLVDDFILSPVVKRSFIQSIKVINAIIKKYGLPNDIIIELAREKNSKDAQKMINEMQKRNRQTNERI |
| | EEIIRTTGKENAKYLIEKIKLHDMQEGKCLYSLEAIPLEDLLNNPFNYEVDHIIPRSVSFDNSFNNKVLVKQ |
| | EENSKKGNRTPFQYLSSSDSKISYETFKKHILNLAKGKGRISKTKKEYLLEERDINRFSVQKDFINRNLVDT |
| | RYATRGLMNLLRSYFRVNNLDVKVKSINGGFTSFLRRKWKFKKERNKGYKHHAEDALIIANADFIFKEWKKL |
| | DKAKKVMENQMFEEKQAESMPEIETEQEYKEIFITPHQIKHIKDFKDYKYSHRVDKKPNRELINDTLYSTRK |
| | DDKGNTLIVNNLNGLYDKDNDKLKKLINKSPEKLLMYHHDPQTYQKLKLIMEQYGDEKNPLYKYYEETGNYL |
| | TKYSKKDNGPVIKKIKYYGNKLNAHLDITDDYPNSRNKVVKLSLKPYRFDVYLDNGVYKFVTVKNLDVIKKE |
| | NYYEVNSKCYEEAKKLKKISNQAEFIASFYNNDLIKINGELYRVIGVNNDLLNRIEVNMIDITYREYLENMN |
| | DKRPPRIIKTIASKTQSIKKYSTDILGNLYEVKSKKHPQIIKKG |
| | (SEQ ID NO: 93) |
| Geobacillus | MKYKIGLDIGITSIGWAVINLDIPRIEDLGVRIFDRAENPKTGESLALPRRLARSARRRLRRRKHRLERIRR |
| thermodenit | LFVREGILTKEELNKLFEKKHEIDVWQLRVEALDRKLNNDELARILLHLAKRRGFRSNRKSERTNKENSTML |
| rifleans | KHIEENQSILSSYRTVAEMVVKDPKFSLHKRNKEDNYTNTVARDDLEREIKLIFAKQREYGNIVCTEAFEHE |
| Cas9 | YISIWASQRPFASKDDIEKKVGFCTFEPKEKRAPKATYTFQSFTVWEHINKLRLVSPGGIRALTDDERRLIY |
| | KQAFHKNKITFHDVRTLLNLPDDTRFKGLLYDRNTTLKENEKVRFLELGAYHKIRKAIDSVYGKGAAKSFRP |
| | IDFDTFGYALTMFKDDTDIRSYLRNEYEQNGKRMENLADKVYDEELIEELLNLSFSKFGHLSLKALRNILPY |
| | MEQGEVYSTACERAGYTFTGPKKKQKTVLLPNIPPIANPVVMRALTQARKVVNAIIKKYGSPVSIHIELARE |
| | LSQSFDERRKMQKEQEGNRKKNETAIRQLVEYGLTLNPTGLDIVKFKLWSEQNGKCAYSLQPIEIERLLEPG |
| | YTEVDHVIPYSRSLDDSYTNKVLVLTKENREKGNRTPAEYLGLGSERWQQFETFVLTNKQFSKKKRDRLLRL |
| | HYDENEENEFKNRNLNDTRYISRFLANFIREHLKFADSDDKQKVYTVNGRITAHLRSRWNFNKNREESNLHH |
| | AVDAAIVACTTPSDIARVTAFYQRREQNKELSKKTDPQFPQPWPHFADELQARLSKNPKESIKALNLGNYDN |
| | EKLESLQPVFVSRMPKRSITGAAHQETLRRYIGIDERSGKIQTVVKKKLSEIQLDKTGHFPMYGKESDPRTY |
| | EAIRQRLLEHNNDPKKAFQEPLYKPKKNGELGPIIRTIKIIDTTNQVIPLNDGKTVAYNSNIVRVDVFEKDG |
| | KYYCVPIYTIDMMKGILPNKAIEPNKPYSEWKEMTEDYTFRFSLYPNDLIRIEFPREKTIKTAVGEEIKIKD |
| | LFAYYQTIDSSNGGLSLVSHDNNFSLRSIGSRTLKRFEKYQVDVLGNIYKVRGEKRVGVASSSHSKAGETIR |
| | PL |
| | (SEQ ID NO: 94) |
| ScCas9 | MEKKYSIGLDIGTNSVGWAVITDDYKVPSKKFKVLGNTNRKSIKKNLMGALLFDSGETAEATRLKRTARRRY |
| S. canis | TRRKNRIRYLQEIFANEMAKLDDSFFQRLEESFLVEEDKKNERHPIFGNLADEVAYHRNYPTIYHLRKKLAD |
| 1375 AA | SPEKADLRLIYLALAHIIKFRGHFLIEGKLNAENSDVAKLFYQLIQTYNQLFEESPLDEIEVDAKGILSARL |
| 159.2 kDa | SKSKRLEKLIAVFPNEKKNGLFGNIIALALGLTPNFKSNFDLTEDAKLQLSKDTYDDDLDELLGQIGDQYAD |
| | LFSAAKNLSDAILLSDILRSNSEVTKAPLSASMVKRYDEHHQDLALLKTLVRQQFPEKYAEIFKDDTKNGYA |
| | GYVGIGIKHRKRTTKLATQEEFYKFIKPILEKMDGAEELLAKLNRDDLLRKQRTFDNGSIPHQIHLKELHAI |
| | LRRQEEFYPFLKENREKIEKILTFRIPYYVGPLARGNSRFAWLTRKSEEAITPWNFEEVVDKGASAQSFIER |
| | MTNFDEQLPNKKVLPKHSLLYEYFTVYNELTKVKYVTERMRKPEFLSGEQKKAIVDLLFKTNRKVTVKQLKE |
| | DYFKKIECFDSVEIIGVEDRFNASLGTYHDLLKIIKDKDFLDNEENEDILEDIVLTLTLFEDREMIEERLKT |
| | YAHLFDDKVMKQLKRRHYTGWGRLSRKMINGIRDKQSGKTILDFLKSDGFSNRNFMQLIHDDSLTFKEEIEK |
| | AQVSGQGDSLHEQIADLAGSPAIKKGILQTVKIVDELVKVMGHKPENIVIEMARENQTTTKGLQQSRERKKR |
| | IEEGIKELESQILKENPVENTQLQNEKLYLYYLQNGRDMYVDQELDINRLSDYDVDHIVPQSFIKDDSIDNK |
| | VLTRSVENRGKSDNVPSEEVVKKMKNYWRQLLNAKLITQRKFDNLTKAERGGLSEADKAGFIKRQLVETRQI |
| | TKHVARILDSRMNTKRDKNDKPIREVKVITLKSKLVSDFRKDFQLYKVRDINNYHHAHDAYLNAVVGTALIK |
| | KYPKLESEFVYGDYKVYDVRKMIAKSEQEIGKATAKRFFYSNIMNFFKTEVKLANGEIRKRPLIETNGETGE |
| | VVWNKEKDFATVRKVLAMPQVNIVKKTEVQTGGFSKESILSKRESAKLIPRKKGWDTRKYGGFGSPTVAYSI |
| | LVVAKVEKGKAKKLKSVKVLVGITIMEKGSYEKDPIGFLEAKGYKDIKKELIFKLPKYSLFELENGRRRMLA |
| | SATELQKANELVLPQHLVRLLYYTQNISATTGSNNLGYIEQHREEFKEIFEKIIDFSEKYILKNKVNSNLKS |
| | SFDEQFAVSDSILLSNSFVSLLKYTSFGASGGFTFLDLDVKQGRLRYQTVTEVLDATLIYQSITGLYETRTD |
| | LSQLGGD (SEQ ID NO: 95) |

[0145] The base editors described herein may include any of the above Cas9 ortholog sequences, or any variants thereof having at least 80%, at least 85%, at least 90%, at least 95%, or at least 99% sequence identity thereto.

[0146] The napDNAbp may include any suitable homologs and/or orthologs or naturally occurring enzymes, such as, Cas9. Cas9 homologs and/or orthologs have been described in various species, including, but not limited to, S. pyogenes and S. thermophilus. Preferably, the Cas moiety is configured (e.g., mutagenized, recombinantly engineered, or otherwise obtained from nature) as a nickase, i.e., capable of cleaving only a single strand of the target double-stranded DNA. Additional suitable Cas9 nucleases and sequences will be apparent to those of skill in the art based on this disclosure, and such Cas9 nucleases and sequences include Cas9 sequences from the organisms and loci disclosed in Chylinski, Rhun, and Charpentier, “The tracrRNA and Cas9 families of type II CRISPR-Cas immunity systems” (2013) RNA Biology 10:5, 726-737; the entire contents of which are incorporated herein by reference. In some embodiments, a Cas9 nuclease has an inactive (e.g., an inactivated) DNA cleavage domain, that is, the Cas9 is a nickase. In some embodiments, the Cas9 protein comprises an amino acid sequence that is at least 80% identical to the amino acid sequence of a Cas9 protein as provided by any one of the variants of Table 3. In some embodiments, the Cas9 protein comprises an amino acid sequence that is at least 85%, at least 90%, at least 92%, at least 95%, at least 96%, at least 97%, at least 98%, at least 99%, or at least 99.5% identical to the amino acid sequence of a Cas9 protein as provided by any one of the Cas9 orthologs in the above tables.

[0147] (iii) Dead Cas9 Variant

[0148] In certain embodiments, the base editors described herein may include a dead Cas9, e.g., dead SpCas9, which has no nuclease activity due to one or more mutations that inactive both nuclease domains of Cas9, namely the RuvC domain (which cleaves the non-protospacer DNA strand) and HNH domain (which cleaves the protospacer DNA strand). The nuclease inactivation may be due to one or mutations that result in one or more substitutions and/or deletions in the amino acid sequence of the encoded protein, or any variants thereof having at least 80%, at least 85%, at least 90%, at least 95%, or at least 99% sequence identity thereto.

[0149] As used herein, the term “dCas9” refers to a nuclease-inactive Cas9 or nuclease-dead Cas9, or a functional fragment thereof, and embraces any naturally occurring dCas9 from any organism, any naturally-occurring dCas9 equivalent or functional fragment thereof, any dCas9 homolog, ortholog, or paralog from any organism, and any mutant or variant of a dCas9, naturally-occurring or engineered. The term dCas9 is not meant to be particularly limiting and may be referred to as a “dCas9 or equivalent.” Exemplary dCas9 proteins and method for making dCas9 proteins are further described herein and/or are described in the art and are incorporated herein by reference.

[0150] In other embodiments, dCas9 corresponds to, or comprises in part or in whole, a Cas9 amino acid sequence having one or more mutations that inactivate the Cas9 nuclease activity. In other embodiments, Cas9 variants having mutations other than D10A and H840A are provided which may result in the full or partial inactivation of the endogenous Cas9 nuclease activity (e.g., nCas9 or dCas9, respectively). Such mutations, by way of example, include other amino acid substitutions at D10 and H840, or other substitutions within the nuclease domains of Cas9 (e.g., substitutions in the HNH nuclease subdomain and/or the RuvC1 subdomain) with reference to a wild type sequence such as Cas9 from Streptococcus pyogenes (NCBI Reference Sequence: NC_017053.1 (SEQ ID NOs: 76-77)). In some embodiments, variants or homologues of Cas9 (e.g., variants of Cas9 from Streptococcus pyogenes (NCBI Reference Sequence: NC_017053.1 (SEQ ID NOs: 76-77))) are provided which are at least about 70% identical, at least about 80% identical, at least about 90% identical, at least about 95% identical, at least about 98% identical, at least about 99% identical, at least about 99.5% identical, or at least about 99.9% identical to NCBI Reference Sequence: NC_017053.1. In some embodiments, variants of dCas9 (e.g., variants of NCBI Reference Sequence: NC_017053.1 (SEQ ID NOs: 76-77)) are provided having amino acid sequences which are shorter, or longer than NC_017053.1 (SEQ ID NOs: 76-77) by about 5 amino acids, by about 10 amino acids, by about 15 amino acids, by about 20 amino acids, by about 25 amino acids, by about 30 amino acids, by about 40 amino acids, by about 50 amino acids, by about 75 amino acids, by about 100 amino acids or more.

[0151] In one embodiment, the dead Cas9 may be based on the canonical SpCas9 sequence of Q99ZW2 and may have the following sequence, which comprises a D10A and an H810A substitutions (underlined and bolded), or may be variant of SEQ ID NO: 96 having at least 80%, at least 85%, at least 90%, at least 95%, or at least 99% sequence identity thereto:

| Description | Sequence | SEQ ID NO : |
|---|---|---|
| dead Cas9 or | MDKKYSIGL [symbol] IGTNSVGWAVITDEYKVPSKKFKVLGNTDRHSIKKNLIGALLFDSGE | SEQ ID NO: 96 |
| dCas9 | TAEATRLKRTARRRYTRRKNRICYLQEIFSNEMAKVDDSFFHRLEESFLVEEDKKHE | |
| Streptococcus | RHPIFGNIVDEVAYHEKYPTIYHLRKKLVDSTDKADLRLIYLALAHMIKFRGHFLIE | |
| pyogenes | GDLNPDNSDVDKLFIQLVQTYNQLFEENPINASGVDAKAILSARLSKSRRLENLIAQ | |
| Q99ZW2 Cas9 | LPGEKKNGLFGNLIALSLGLTPNFKSNFDLAEDAKLQLSKDTYDDDLDNLLAQIGDQ | |
| with D10 [symbol] | YADLFLAAKNLSDAILLSDILRVNTEITKAPLSASMIKRYDEHHQDLTLLKALVRQQ | |
| and H810 [symbol] | LPEKYKEIFFDQSKNGYAGYIDGGASQEEFYKFIKPILEKMDGTEELLVKLNREDLL | |
| Where “X” is | RKQRTFDNGSIPHQIHLGELHAILRRQEDFYPFLKDNREKIEKILTFRIPYYVGPLA | |
| any amino | RGNSRFAWMTRKSEETITPWNFEEVVDKGASAQSFIERMTNFDKNLPNEKVLPKHSL | |
| acid | LYEYFTVYNELTKVKYVTEGMRKPAFLSGEQKKAIVDLLFKTNRKVTVKQLKEDYFK | |
| | KIECFDSVEISGVEDRFNASLGTYHDLLKIIKDKDFLDNEENEDILEDIVLTLTLFE | |
| | DREMIEERLKTYAHLFDDKVMKQLKRRRYTGWGRLSRKLINGIRDKQSGKTILDFLK | |
| | SDGFANRNFMQLIHDDSLTFKEDIQKAQVSGQGDSLHEHIANLAGSPAIKKGILQTV | |
| | KVVDELVKVMGRHKPENIVIEMARENQTTQKGQKNSRERMKRIEEGIKELGSQILKE | |
| | HPVENTQLQNEKLYLYYLQNGRDMYVDQELDINRLSDYDVD [symbol] IVPQSFLKDDSIDNK | |
| | VLTRSDKNRGKSDNVPSEEVVKKMKNYWRQLLNAKLITQRKFDNLTKAERGGLSELD | |
| | KAGFIKRQLVETRQITKHVAQILDSRMNTKYDENDKLIREVKVITLKSKLVSDFRKD | |
| | FQFYKVREINNYHHAHDAYLNAVVGTALIKKYPKLESEFVYGDYKVYDVRKMIAKSE | |
| | QEIGKATAKYFFYSNIMNFFKTEITLANGEIRKRPLIETNGETGEIVWDKGRDFATV | |
| | RKVLSMPQVNIVKKTEVQTGGFSKESILPKRNSDKLIARKKDWDPKKYGGFDSPTVA | |
| | YSVLVVAKVEKGKSKKLKSVKELLGITIMERSSFEKNPIDFLEAKGYKEVKKDLIIK | |
| | LPKYSLFELENGRKRMLASAGELQKGNELALPSKYVNFLYLASHYEKLKGSPEDNEQ | |
| | KQLFVEQHKHYLDEIIEQISEFSKRVILADANLDKVLSAYNKHRDKPIREQAENIIH | |
| | LFTLTNLGAPAAFKYFDTTIDRKRYTSTKEVLDATLIHQSITGLYETRIDLSQLGGD | |
| dead Cas9 or | MDKKYSIGL [symbol] IGTNSVGWAVITDEYKVPSKKFKVLGNTDRHSIKKNLIGALLFDSGE | SEQ ID NO: 97 |
| dCas9 | TAEATRLKRTARRRYTRRKNRICYLQEIFSNEMAKVDDSFFHRLEESFLVEEDKKHE | |
| Streptococcus | RHPIFGNIVDEVAYHEKYPTIYHLRKKLVDSTDKADLRLIYLALAHMIKFRGHFLIE | |
| pyogenes | GDLNPDNSDVDKLFIQLVQTYNQLFEENPINASGVDAKAILSARLSKSRRLENLIAQ | |
| Q99ZW2 Cas9 | LPGEKKNGLFGNLIALSLGLTPNFKSNFDLAEDAKLQLSKDTYDDDLDNLLAQIGDQ | |
| with D10 [symbol] | YADLFLAAKNLSDAILLSDILRVNTEITKAPLSASMIKRYDEHHQDLTLLKALVRQQ | |
| and H810 [symbol] | LPEKYKEIFFDQSKNGYAGYIDGGASQEEFYKFIKPILEKMDGTEELLVKLNREDLL | |
| | RKQRTFDNGSIPHQIHLGELHAILRRQEDFYPFLKDNREKIEKILTFRIPYYVGPLA | |
| | RGNSRFAWMTRKSEETITPWNFEEVVDKGASAQSFIERMTNFDKNLPNEKVLPKHSL | |
| | LYEYFTVYNELTKVKYVTEGMRKPAFLSGEQKKAIVDLLFKTNRKVTVKQLKEDYFK | |
| | KIECFDSVEISGVEDRFNASLGTYHDLLKIIKDKDFLDNEENEDILEDIVLTLTLFE | |
| | DREMIEERLKTYAHLFDDKVMKQLKRRRYTGWGRLSRKLINGIRDKQSGKTILDFLK | |
| | SDGFANRNFMQLIHDDSLTFKEDIQKAQVSGQGDSLHEHIANLAGSPAIKKGILQTV | |
| | KVVDELVKVMGRHKPENIVIEMARENQTTQKGQKNSRERMKRIEEGIKELGSQILKE | |
| | HPVENTQLQNEKLYLYYLQNGRDMYVDQELDINRLSDYDVD [symbol] IVPQSFLKDDSIDNK | |
| | VLTRSDKNRGKSDNVPSEEVVKKMKNYWRQLLNAKLITQRKFDNLTKAERGGLSELD | |
| | KAGFIKRQLVETRQITKHVAQILDSRMNTKYDENDKLIREVKVITLKSKLVSDFRKD | |
| | FQFYKVREINNYHHAHDAYLNAVVGTALIKKYPKLESEFVYGDYKVYDVRKMIAKSE | |
| | QEIGKATAKYFFYSNIMNFFKTEITLANGEIRKRPLIETNGETGEIVWDKGRDFATV | |
| | RKVLSMPQVNIVKKTEVQTGGFSKESILPKRNSDKLIARKKDWDPKKYGGFDSPTVA | |
| | YSVLVVAKVEKGKSKKLKSVKELLGITIMERSSFEKNPIDFLEAKGYKEVKKDLIIK | |
| | LPKYSLFELENGRKRMLASAGELQKGNELALPSKYVNFLYLASHYEKLKGSPEDNEQ | |
| | KQLFVEQHKHYLDEIIEQISEFSKRVILADANLDKVLSAYNKHRDKPIREQAENIIH | |
| | LFTLTNLGAPAAFKYFDTTIDRKRYTSTKEVLDATLIHQSITGLYETRIDLSQLGGD | |

[0152] (iv) Cas9 Nickase Variant

[0153] In one embodiment, the base editors described herein comprise a Cas9 nickase. The term “Cas9 nickase” of “nCas9” refers to a variant of Cas9 which is capable of introducing a single-strand break in a double strand DNA molecule target. In some embodiments, the Cas9 nickase comprises only a single functioning nuclease domain. The wild type Cas9 (e.g., the canonical SpCas9) comprises two separate nuclease domains, namely, the RuvC domain (which cleaves the non-protospacer DNA strand) and HNH domain (which cleaves the protospacer DNA strand). In one embodiment, the Cas9 nickase comprises a mutation in the RuvC domain which inactivates the RuvC nuclease activity. For example, mutations in aspartate (D) 10, histidine (H) 983, aspartate (D) 986, or glutamate (E) 762, have been reported as loss-of-function mutations of the RuvC nuclease domain and the creation of a functional Cas9 nickase (e.g., Nishimasu et al., “Crystal structure of Cas9 in complex with guide RNA and target DNA,” Cell 156(5), 935-949, which is incorporated herein by reference). Thus, nickase mutations in the RuvC domain could include D10X, H983X, D986X, or E762X, wherein X is any amino acid other than the wild type amino acid. In certain embodiments, the nickase could be D10A, of H983A, or D986A, or E762A, or a combination thereof.

[0154] In various embodiments, the Cas9 nickase can have a mutation in the RuvC nuclease domain and have one of the following amino acid sequences, or a variant thereof having an amino acid sequence that has at least 80%, at least 85%, at least 90%, at least 95%, or at least 99% sequence identity thereto.

| Description | Sequence | SEQ ID NO : |
|---|---|---|
| Cas9 nickase | MDKKYSIGL [symbol] IGTNSVGWAVITDEYKVPSKKFKVLGNTDRHSIKKNLIGALLFDSGE | SEQ ID NO: 98 |
| Streptococcus | TAEATRLKRTARRRYTRRKNRICYLQEIFSNEMAKVDDSFFHRLEESFLVEEDKKHE | |
| pyogenes | RHPIFGNIVDEVAYHEKYPTIYHLRKKLVDSTDKADLRLIYLALAHMIKFRGHFLIE | |
| Q99ZW2 Cas9 | GDLNPDNSDVDKLFIQLVQTYNQLFEENPINASGVDAKAILSARLSKSRRLENLIAQ | |
| with D10 [symbol] , | LPGEKKNGLFGNLIALSLGLTPNFKSNFDLAEDAKLQLSKDTYDDDLDNLLAQIGDQ | |
| wherein X is | YADLFLAAKNLSDAILLSDILRVNTEITKAPLSASMIKRYDEHHQDLTLLKALVRQQ | |
| any | LPEKYKEIFFDQSKNGYAGYIDGGASQEEFYKFIKPILEKMDGTEELLVKLNREDLL | |
| alternate | RKQRTFDNGSIPHQIHLGELHAILRRQEDFYPFLKDNREKIEKILTFRIPYYVGPLA | |
| amino acid | RGNSRFAWMTRKSEETITPWNFEEVVDKGASAQSFIERMTNFDKNLPNEKVLPKHSL | |
| | LYEYFTVYNELTKVKYVTEGMRKPAFLSGEQKKAIVDLLFKTNRKVTVKQLKEDYFK | |
| | KIECFDSVEISGVEDRFNASLGTYHDLLKIIKDKDFLDNEENEDILEDIVLTLTLFE | |
| | DREMIEERLKTYAHLFDDKVMKQLKRRRYTGWGRLSRKLINGIRDKQSGKTILDFLK | |
| | SDGFANRNFMQLIHDDSLTFKEDIQKAQVSGQGDSLHEHIANLAGSPAIKKGILQTV | |
| | KVVDELVKVMGRHKPENIVIEMARENQTTQKGQKNSRERMKRIEEGIKELGSQILKE | |
| | HPVENTQLQNEKLYLYYLQNGRDMYVDQELDINRLSDYDVDHIVPQSFLKDDSIDNK | |
| | VLTRSDKNRGKSDNVPSEEVVKKMKNYWRQLLNAKLITQRKFDNLTKAERGGLSELD | |
| | KAGFIKRQLVETRQITKHVAQILDSRMNTKYDENDKLIREVKVITLKSKLVSDFRKD | |
| | FQFYKVREINNYHHAHDAYLNAVVGTALIKKYPKLESEFVYGDYKVYDVRKMIAKSE | |
| | QEIGKATAKYFFYSNIMNFFKTEITLANGEIRKRPLIETNGETGEIVWDKGRDFATV | |
| | RKVLSMPQVNIVKKTEVQTGGFSKESILPKRNSDKLIARKKDWDPKKYGGFDSPTVA | |
| | YSVLVVAKVEKGKSKKLKSVKELLGITIMERSSFEKNPIDFLEAKGYKEVKKDLIIK | |
| | LPKYSLFELENGRKRMLASAGELQKGNELALPSKYVNFLYLASHYEKLKGSPEDNEQ | |
| | KQLFVEQHKHYLDEIIEQISEFSKRVILADANLDKVLSAYNKHRDKPIREQAENIIH | |
| | LFTLTNLGAPAAFKYFDTTIDRKRYTSTKEVLDATLIHQSITGLYETRIDLSQLGGD | |
| Cas9 nickase | MDKKYSIGLDIGTNSVGWAVITDEYKVPSKKFKVLGNTDRHSIKKNLIGALLFDSGE | SEQ ID NO: 99 |
| Streptococcus | TAEATRLKRTARRRYTRRKNRICYLQEIFSNEMAKVDDSFFHRLEESFLVEEDKKHE | |
| pyogenes | RHPIFGNIVDEVAYHEKYPTIYHLRKKLVDSTDKADLRLIYLALAHMIKFRGHFLIE | |
| Q99ZW2 Cas9 | GDLNPDNSDVDKLFIQLVQTYNQLFEENPINASGVDAKAILSARLSKSRRLENLIAQ | |
| with E762X, | LPGEKKNGLFGNLIALSLGLTPNFKSNFDLAEDAKLQLSKDTYDDDLDNLLAQIGDQ | |
| wherein X is | YADLFLAAKNLSDAILLSDILRVNTEITKAPLSASMIKRYDEHHQDLTLLKALVRQQ | |
| any | LPEKYKEIFFDQSKNGYAGYIDGGASQEEFYKFIKPILEKMDGTEELLVKLNREDLL | |
| alternate | RKQRTFDNGSIPHQIHLGELHAILRRQEDFYPFLKDNREKIEKILTFRIPYYVGPLA | |
| amino acid | RGNSRFAWMTRKSEETITPWNFEEVVDKGASAQSFIERMTNFDKNLPNEKVLPKHSL | |
| | LYEYFTVYNELTKVKYVTEGMRKPAFLSGEQKKAIVDLLFKTNRKVTVKQLKEDYFK | |
| | KIECFDSVEISGVEDRFNASLGTYHDLLKIIKDKDFLDNEENEDILEDIVLTLTLFE | |
| | DREMIEERLKTYAHLFDDKVMKQLKRRRYTGWGRLSRKLINGIRDKQSGKTILDFLK | |
| | SDGFANRNFMQLIHDDSLTFKEDIQKAQVSGQGDSLHEHIANLAGSPAIKKGILQTV | |
| | KVVDELVKVMGRHKPENIVI [symbol] MARENQTTQKGQKNSRERMKRIEEGIKELGSQILKE | |
| | HPVENTQLQNEKLYLYYLQNGRDMYVDQELDINRLSDYDVDHIVPQSFLKDDSIDNK | |
| | VLTRSDKNRGKSDNVPSEEVVKKMKNYWRQLLNAKLITQRKFDNLTKAERGGLSELD | |
| | KAGFIKRQLVETRQITKHVAQILDSRMNTKYDENDKLIREVKVITLKSKLVSDFRKD | |
| | FQFYKVREINNYHHAHDAYLNAVVGTALIKKYPKLESEFVYGDYKVYDVRKMIAKSE | |
| | QEIGKATAKYFFYSNIMNFFKTEITLANGEIRKRPLIETNGETGEIVWDKGRDFATV | |
| | RKVLSMPQVNIVKKTEVQTGGFSKESILPKRNSDKLIARKKDWDPKKYGGFDSPTVA | |
| | YSVLVVAKVEKGKSKKLKSVKELLGITIMERSSFEKNPIDFLEAKGYKEVKKDLIIK | |
| | LPKYSLFELENGRKRMLASAGELQKGNELALPSKYVNFLYLASHYEKLKGSPEDNEQ | |
| | KQLFVEQHKHYLDEIIEQISEFSKRVILADANLDKVLSAYNKHRDKPIREQAENIIH | |
| | LFTLTNLGAPAAFKYFDTTIDRKRYTSTKEVLDATLIHQSITGLYETRIDLSQLGGD | |
| Cas9 nickase | MDKKYSIGLDIGTNSVGWAVITDEYKVPSKKFKVLGNTDRHSIKKNLIGALLFDSGE | SEQ ID NO: |
| Streptococcus | TAEATRLKRTARRRYTRRKNRICYLQEIFSNEMAKVDDSFFHRLEESFLVEEDKKHE | 100 |
| pyogenes | RHPIFGNIVDEVAYHEKYPTIYHLRKKLVDSTDKADLRLIYLALAHMIKFRGHFLIE | |
| Q99ZW2 Cas9 | GDLNPDNSDVDKLFIQLVQTYNQLFEENPINASGVDAKAILSARLSKSRRLENLIAQ | |
| with H983X, | LPGEKKNGLFGNLIALSLGLTPNFKSNFDLAEDAKLQLSKDTYDDDLDNLLAQIGDQ | |
| wherein X is | YADLFLAAKNLSDAILLSDILRVNTEITKAPLSASMIKRYDEHHQDLTLLKALVRQQ | |
| any | LPEKYKEIFFDQSKNGYAGYIDGGASQEEFYKFIKPILEKMDGTEELLVKLNREDLL | |
| alternate | RKQRTFDNGSIPHQIHLGELHAILRRQEDFYPFLKDNREKIEKILTFRIPYYVGPLA | |
| amino acid | RGNSRFAWMTRKSEETITPWNFEEVVDKGASAQSFIERMTNFDKNLPNEKVLPKHSL | |
| | LYEYFTVYNELTKVKYVTEGMRKPAFLSGEQKKAIVDLLFKTNRKVTVKQLKEDYFK | |
| | KIECFDSVEISGVEDRFNASLGTYHDLLKIIKDKDFLDNEENEDILEDIVLTLTLFE | |
| | DREMIEERLKTYAHLFDDKVMKQLKRRRYTGWGRLSRKLINGIRDKQSGKTILDFLK | |
| | SDGFANRNFMQLIHDDSLTFKEDIQKAQVSGQGDSLHEHIANLAGSPAIKKGILQTV | |
| | KVVDELVKVMGRHKPENIVIEMARENQTTQKGQKNSRERMKRIEEGIKELGSQILKE | |
| | HPVENTQLQNEKLYLYYLQNGRDMYVDQELDINRLSDYDVDHIVPQSFLKDDSIDNK | |
| | VLTRSDKNRGKSDNVPSEEVVKKMKNYWRQLLNAKLITQRKFDNLTKAERGGLSELD | |
| | KAGFIKRQLVETRQITKHVAQILDSRMNTKYDENDKLIREVKVITLKSKLVSDFRKD | |
| | FQFYKVREINNYH [symbol] AHDAYLNAVVGTALIKKYPKLESEFVYGDYKVYDVRKMIAKSE | |
| | QEIGKATAKYFFYSNIMNFFKTEITLANGEIRKRPLIETNGETGEIVWDKGRDFATV | |
| | RKVLSMPQVNIVKKTEVQTGGFSKESILPKRNSDKLIARKKDWDPKKYGGFDSPTVA | |
| | YSVLVVAKVEKGKSKKLKSVKELLGITIMERSSFEKNPIDFLEAKGYKEVKKDLIIK | |
| | LPKYSLFELENGRKRMLASAGELQKGNELALPSKYVNFLYLASHYEKLKGSPEDNEQ | |
| | KQLFVEQHKHYLDEIIEQISEFSKRVILADANLDKVLSAYNKHRDKPIREQAENIIH | |
| | LFTLTNLGAPAAFKYFDTTIDRKRYTSTKEVLDATLIHQSITGLYETRIDLSQLGGD | |
| Cas9 nickase | MDKKYSIGLDIGTNSVGWAVITDEYKVPSKKFKVLGNTDRHSIKKNLIGALLFDSGE | SEQ ID NO: |
| Streptococcus | TAEATRLKRTARRRYTRRKNRICYLQEIFSNEMAKVDDSFFHRLEESFLVEEDKKHE | 101 |
| pyogenes | RHPIFGNIVDEVAYHEKYPTIYHLRKKLVDSTDKADLRLIYLALAHMIKFRGHFLIE | |
| Q99ZW2 Cas9 | GDLNPDNSDVDKLFIQLVQTYNQLFEENPINASGVDAKAILSARLSKSRRLENLIAQ | |
| with D986X, | LPGEKKNGLFGNLIALSLGLTPNFKSNFDLAEDAKLQLSKDTYDDDLDNLLAQIGDQ | |
| wherein X is | YADLFLAAKNLSDAILLSDILRVNTEITKAPLSASMIKRYDEHHQDLTLLKALVRQQ | |
| any | LPEKYKEIFFDQSKNGYAGYIDGGASQEEFYKFIKPILEKMDGTEELLVKLNREDLL | |
| alternate | RKQRTFDNGSIPHQIHLGELHAILRRQEDFYPFLKDNREKIEKILTFRIPYYVGPLA | |
| amino acid | RGNSRFAWMTRKSEETITPWNFEEVVDKGASAQSFIERMTNFDKNLPNEKVLPKHSL | |
| | LYEYFTVYNELTKVKYVTEGMRKPAFLSGEQKKAIVDLLFKTNRKVTVKQLKEDYFK | |
| | KIECFDSVEISGVEDRFNASLGTYHDLLKIIKDKDFLDNEENEDILEDIVLTLTLFE | |
| | DREMIEERLKTYAHLFDDKVMKQLKRRRYTGWGRLSRKLINGIRDKQSGKTILDFLK | |
| | SDGFANRNFMQLIHDDSLTFKEDIQKAQVSGQGDSLHEHIANLAGSPAIKKGILQTV | |
| | KVVDELVKVMGRHKPENIVIEMARENQTTQKGQKNSRERMKRIEEGIKELGSQILKE | |
| | HPVENTQLQNEKLYLYYLQNGRDMYVDQELDINRLSDYDVDHIVPQSFLKDDSIDNK | |
| | VLTRSDKNRGKSDNVPSEEVVKKMKNYWRQLLNAKLITQRKFDNLTKAERGGLSELD | |
| | KAGFIKRQLVETRQITKHVAQILDSRMNTKYDENDKLIREVKVITLKSKLVSDFRKD | |
| | FQFYKVREINNYHHAH [symbol] AYLNAVVGTALIKKYPKLESEFVYGDYKVYDVRKMIAKSE | |
| | QEIGKATAKYFFYSNIMNFFKTEITLANGEIRKRPLIETNGETGEIVWDKGRDFATV | |
| | RKVLSMPQVNIVKKTEVQTGGFSKESILPKRNSDKLIARKKDWDPKKYGGFDSPTVA | |
| | YSVLVVAKVEKGKSKKLKSVKELLGITIMERSSFEKNPIDFLEAKGYKEVKKDLIIK | |
| | LPKYSLFELENGRKRMLASAGELQKGNELALPSKYVNFLYLASHYEKLKGSPEDNEQ | |
| | KQLFVEQHKHYLDEIIEQISEFSKRVILADANLDKVLSAYNKHRDKPIREQAENIIH | |
| | LFTLTNLGAPAAFKYFDTTIDRKRYTSTKEVLDATLIHQSITGLYETRIDLSQLGGD | |
| Cas9 nickase | MDKKYSIGL [symbol] IGTNSVGWAVITDEYKVPSKKFKVLGNTDRHSIKKNLIGALLFDSGE | SEQ ID NO: |
| Streptococcus | TAEATRLKRTARRRYTRRKNRICYLQEIFSNEMAKVDDSFFHRLEESFLVEEDKKHE | 102 |
| pyogenes | RHPIFGNIVDEVAYHEKYPTIYHLRKKLVDSTDKADLRLIYLALAHMIKFRGHFLIE | |
| Q99ZW2 Cas9 | GDLNPDNSDVDKLFIQLVQTYNQLFEENPINASGVDAKAILSARLSKSRRLENLIAQ | |
| with D10 [symbol] | LPGEKKNGLFGNLIALSLGLTPNFKSNFDLAEDAKLQLSKDTYDDDLDNLLAQIGDQ | |
| | YADLFLAAKNLSDAILLSDILRVNTEITKAPLSASMIKRYDEHHQDLTLLKALVRQQ | |
| | LPEKYKEIFFDQSKNGYAGYIDGGASQEEFYKFIKPILEKMDGTEELLVKLNREDLL | |
| | RKQRTFDNGSIPHQIHLGELHAILRRQEDFYPFLKDNREKIEKILTFRIPYYVGPLA | |
| | RGNSRFAWMTRKSEETITPWNFEEVVDKGASAQSFIERMTNFDKNLPNEKVLPKHSL | |
| | LYEYFTVYNELTKVKYVTEGMRKPAFLSGEQKKAIVDLLFKTNRKVTVKQLKEDYFK | |
| | KIECFDSVEISGVEDRFNASLGTYHDLLKIIKDKDFLDNEENEDILEDIVLTLTLFE | |
| | DREMIEERLKTYAHLFDDKVMKQLKRRRYTGWGRLSRKLINGIRDKQSGKTILDFLK | |
| | SDGFANRNFMQLIHDDSLTFKEDIQKAQVSGQGDSLHEHIANLAGSPAIKKGILQTV | |
| | KVVDELVKVMGRHKPENIVIEMARENQTTQKGQKNSRERMKRIEEGIKELGSQILKE | |
| | HPVENTQLQNEKLYLYYLQNGRDMYVDQELDINRLSDYDVDHIVPQSFLKDDSIDNK | |
| | VLTRSDKNRGKSDNVPSEEVVKKMKNYWRQLLNAKLITQRKFDNLTKAERGGLSELD | |
| | KAGFIKRQLVETRQITKHVAQILDSRMNTKYDENDKLIREVKVITLKSKLVSDFRKD | |
| | FQFYKVREINNYHHAHDAYLNAVVGTALIKKYPKLESEFVYGDYKVYDVRKMIAKSE | |
| | QEIGKATAKYFFYSNIMNFFKTEITLANGEIRKRPLIETNGETGEIVWDKGRDFATV | |
| | RKVLSMPQVNIVKKTEVQTGGFSKESILPKRNSDKLIARKKDWDPKKYGGFDSPTVA | |
| | YSVLVVAKVEKGKSKKLKSVKELLGITIMERSSFEKNPIDFLEAKGYKEVKKDLIIK | |
| | LPKYSLFELENGRKRMLASAGELQKGNELALPSKYVNFLYLASHYEKLKGSPEDNEQ | |
| | KQLFVEQHKHYLDEIIEQISEFSKRVILADANLDKVLSAYNKHRDKPIREQAENIIH | |
| | LFTLTNLGAPAAFKYFDTTIDRKRYTSTKEVLDATLIHQSITGLYETRIDLSQLGGD | |
| Cas9 nickase | MDKKYSIGLDIGTNSVGWAVITDEYKVPSKKFKVLGNTDRHSIKKNLIGALLFDSGE | SEQ ID NO: |
| Streptococcus | TAEATRLKRTARRRYTRRKNRICYLQEIFSNEMAKVDDSFFHRLEESFLVEEDKKHE | 103 |
| pyogenes | RHPIFGNIVDEVAYHEKYPTIYHLRKKLVDSTDKADLRLIYLALAHMIKFRGHFLIE | |
| Q99ZW2 Cas9 | GDLNPDNSDVDKLFIQLVQTYNQLFEENPINASGVDAKAILSARLSKSRRLENLIAQ | |
| with E762A | LPGEKKNGLFGNLIALSLGLTPNFKSNFDLAEDAKLQLSKDTYDDDLDNLLAQIGDQ | |
| | YADLFLAAKNLSDAILLSDILRVNTEITKAPLSASMIKRYDEHHQDLTLLKALVRQQ | |
| | LPEKYKEIFFDQSKNGYAGYIDGGASQEEFYKFIKPILEKMDGTEELLVKLNREDLL | |
| | RKQRTFDNGSIPHQIHLGELHAILRRQEDFYPFLKDNREKIEKILTFRIPYYVGPLA | |
| | RGNSRFAWMTRKSEETITPWNFEEVVDKGASAQSFIERMTNFDKNLPNEKVLPKHSL | |
| | LYEYFTVYNELTKVKYVTEGMRKPAFLSGEQKKAIVDLLFKTNRKVTVKQLKEDYFK | |
| | KIECFDSVEISGVEDRFNASLGTYHDLLKIIKDKDFLDNEENEDILEDIVLTLTLFE | |
| | DREMIEERLKTYAHLFDDKVMKQLKRRRYTGWGRLSRKLINGIRDKQSGKTILDFLK | |
| | SDGFANRNFMQLIHDDSLTFKEDIQKAQVSGQGDSLHEHIANLAGSPAIKKGILQTV | |
| | KVVDELVKVMGRHKPENIVI [symbol] MARENQTTQKGQKNSRERMKRIEEGIKELGSQILKE | |
| | HPVENTQLQNEKLYLYYLQNGRDMYVDQELDINRLSDYDVDHIVPQSFLKDDSIDNK | |
| | VLTRSDKNRGKSDNVPSEEVVKKMKNYWRQLLNAKLITQRKFDNLTKAERGGLSELD | |
| | KAGFIKRQLVETRQITKHVAQILDSRMNTKYDENDKLIREVKVITLKSKLVSDFRKD | |
| | FQFYKVREINNYHHAHDAYLNAVVGTALIKKYPKLESEFVYGDYKVYDVRKMIAKSE | |
| | QEIGKATAKYFFYSNIMNFFKTEITLANGEIRKRPLIETNGETGEIVWDKGRDFATV | |
| | RKVLSMPQVNIVKKTEVQTGGFSKESILPKRNSDKLIARKKDWDPKKYGGFDSPTVA | |
| | YSVLVVAKVEKGKSKKLKSVKELLGITIMERSSFEKNPIDFLEAKGYKEVKKDLIIK | |
| | LPKYSLFELENGRKRMLASAGELQKGNELALPSKYVNFLYLASHYEKLKGSPEDNEQ | |
| | KQLFVEQHKHYLDEIIEQISEFSKRVILADANLDKVLSAYNKHRDKPIREQAENIIH | |
| | LFTLTNLGAPAAFKYFDTTIDRKRYTSTKEVLDATLIHQSITGLYETRIDLSQLGGD | |
| Cas9 nickase | MDKKYSIGLDIGTNSVGWAVITDEYKVPSKKFKVLGNTDRHSIKKNLIGALLFDSGE | SEQ ID NO: |
| Streptococcus | TAEATRLKRTARRRYTRRKNRICYLQEIFSNEMAKVDDSFFHRLEESFLVEEDKKHE | 104 |
| pyogenes | RHPIFGNIVDEVAYHEKYPTIYHLRKKLVDSTDKADLRLIYLALAHMIKFRGHFLIE | |
| Q99ZW2 Cas9 | GDLNPDNSDVDKLFIQLVQTYNQLFEENPINASGVDAKAILSARLSKSRRLENLIAQ | |
| with H983A | LPGEKKNGLFGNLIALSLGLTPNFKSNFDLAEDAKLQLSKDTYDDDLDNLLAQIGDQ | |
| | YADLFLAAKNLSDAILLSDILRVNTEITKAPLSASMIKRYDEHHQDLTLLKALVRQQ | |
| | LPEKYKEIFFDQSKNGYAGYIDGGASQEEFYKFIKPILEKMDGTEELLVKLNREDLL | |
| | RKQRTFDNGSIPHQIHLGELHAILRRQEDFYPFLKDNREKIEKILTFRIPYYVGPLA | |
| | RGNSRFAWMTRKSEETITPWNFEEVVDKGASAQSFIERMTNFDKNLPNEKVLPKHSL | |
| | LYEYFTVYNELTKVKYVTEGMRKPAFLSGEQKKAIVDLLFKTNRKVTVKQLKEDYFK | |
| | KIECFDSVEISGVEDRFNASLGTYHDLLKIIKDKDFLDNEENEDILEDIVLTLTLFE | |
| | DREMIEERLKTYAHLFDDKVMKQLKRRRYTGWGRLSRKLINGIRDKQSGKTILDFLK | |
| | SDGFANRNFMQLIHDDSLTFKEDIQKAQVSGQGDSLHEHIANLAGSPAIKKGILQTV | |
| | KVVDELVKVMGRHKPENIVIEMARENQTTQKGQKNSRERMKRIEEGIKELGSQILKE | |
| | HPVENTQLQNEKLYLYYLQNGRDMYVDQELDINRLSDYDVDHIVPQSFLKDDSIDNK | |
| | VLTRSDKNRGKSDNVPSEEVVKKMKNYWRQLLNAKLITQRKFDNLTKAERGGLSELD | |
| | KAGFIKRQLVETRQITKHVAQILDSRMNTKYDENDKLIREVKVITLKSKLVSDFRKD | |
| | FQFYKVREINNYH [symbol] AHDAYLNAVVGTALIKKYPKLESEFVYGDYKVYDVRKMIAKSE | |
| | QEIGKATAKYFFYSNIMNFFKTEITLANGEIRKRPLIETNGETGEIVWDKGRDFATV | |
| | RKVLSMPQVNIVKKTEVQTGGFSKESILPKRNSDKLIARKKDWDPKKYGGFDSPTVA | |
| | YSVLVVAKVEKGKSKKLKSVKELLGITIMERSSFEKNPIDFLEAKGYKEVKKDLIIK | |
| | LPKYSLFELENGRKRMLASAGELQKGNELALPSKYVNFLYLASHYEKLKGSPEDNEQ | |
| | KQLFVEQHKHYLDEIIEQISEFSKRVILADANLDKVLSAYNKHRDKPIREQAENIIH | |
| | LFTLTNLGAPAAFKYFDTTIDRKRYTSTKEVLDATLIHQSITGLYETRIDLSQLGGD | |
| Cas9 nickase | MDKKYSIGLDIGTNSVGWAVITDEYKVPSKKFKVLGNTDRHSIKKNLIGALLFDSGE | SEQ ID NO: |
| Streptococcus | TAEATRLKRTARRRYTRRKNRICYLQEIFSNEMAKVDDSFFHRLEESFLVEEDKKHE | 105 |
| pyogenes | RHPIFGNIVDEVAYHEKYPTIYHLRKKLVDSTDKADLRLIYLALAHMIKFRGHFLIE | |
| Q99ZW2 Cas9 | GDLNPDNSDVDKLFIQLVQTYNQLFEENPINASGVDAKAILSARLSKSRRLENLIAQ | |
| with D986A | LPGEKKNGLFGNLIALSLGLTPNFKSNFDLAEDAKLQLSKDTYDDDLDNLLAQIGDQ | |
| | YADLFLAAKNLSDAILLSDILRVNTEITKAPLSASMIKRYDEHHQDLTLLKALVRQQ | |
| | LPEKYKEIFFDQSKNGYAGYIDGGASQEEFYKFIKPILEKMDGTEELLVKLNREDLL | |
| | RKQRTFDNGSIPHQIHLGELHAILRRQEDFYPFLKDNREKIEKILTFRIPYYVGPLA | |
| | RGNSRFAWMTRKSEETITPWNFEEVVDKGASAQSFIERMTNFDKNLPNEKVLPKHSL | |
| | LYEYFTVYNELTKVKYVTEGMRKPAFLSGEQKKAIVDLLFKTNRKVTVKQLKEDYFK | |
| | KIECFDSVEISGVEDRFNASLGTYHDLLKIIKDKDFLDNEENEDILEDIVLTLTLFE | |
| | DREMIEERLKTYAHLFDDKVMKQLKRRRYTGWGRLSRKLINGIRDKQSGKTILDFLK | |
| | SDGFANRNFMQLIHDDSLTFKEDIQKAQVSGQGDSLHEHIANLAGSPAIKKGILQTV | |
| | KVVDELVKVMGRHKPENIVIEMARENQTTQKGQKNSRERMKRIEEGIKELGSQILKE | |
| | HPVENTQLQNEKLYLYYLQNGRDMYVDQELDINRLSDYDVDHIVPQSFLKDDSIDNK | |
| | VLTRSDKNRGKSDNVPSEEVVKKMKNYWRQLLNAKLITQRKFDNLTKAERGGLSELD | |
| | KAGFIKRQLVETRQITKHVAQILDSRMNTKYDENDKLIREVKVITLKSKLVSDFRKD | |
| | FQFYKVREINNYHHAH [symbol] AYLNAVVGTALIKKYPKLESEFVYGDYKVYDVRKMIAKSE | |
| | QEIGKATAKYFFYSNIMNFFKTEITLANGEIRKRPLIETNGETGEIVWDKGRDFATV | |
| | RKVLSMPQVNIVKKTEVQTGGFSKESILPKRNSDKLIARKKDWDPKKYGGFDSPTVA | |
| | YSVLVVAKVEKGKSKKLKSVKELLGITIMERSSFEKNPIDFLEAKGYKEVKKDLIIK | |
| | LPKYSLFELENGRKRMLASAGELQKGNELALPSKYVNFLYLASHYEKLKGSPEDNEQ | |
| | KQLFVEQHKHYLDEIIEQISEFSKRVILADANLDKVLSAYNKHRDKPIREQAENIIH | |
| | LFTLTNLGAPAAFKYFDTTIDRKRYTSTKEVLDATLIHQSITGLYETRIDLSQLGGD | |

[0155] In another embodiment, the Cas9 nickase comprises a mutation in the HNH domain which inactivates the HNH nuclease activity. For example, mutations in histidine (H) 840 or asparagine (R) 863 have been reported as loss-of-function mutations of the HNH nuclease domain and the creation of a functional Cas9 nickase (e.g., Nishimasu et al., “Crystal structure of Cas9 in complex with guide RNA and target DNA,” Cell 156(5), 935-949, which is incorporated herein by reference). Thus, nickase mutations in the HNH domain could include H840X and R863X, wherein X is any amino acid other than the wild type amino acid. In certain embodiments, the nickase could be H840A or R863A or a combination thereof.

[0156] In various embodiments, the Cas9 nickase can have a mutation in the HNH nuclease domain and have one of the following amino acid sequences, or a variant thereof having an amino acid sequence that has at least 80%, at least 85%, at least 90%, at least 95%, or at least 99% sequence identity thereto.

| Description | Sequence | SEQ ID NO: |
|---|---|---|
| Cas9 nickase | MDKKYSIGLDIGTNSVGWAVITDEYKVPSKKFKVLGNTDRHSIKKNLIGALLFDSGE | SEQ ID NO: |
| Streptococcus | TAEATRLKRTARRRYTRRKNRICYLQEIFSNEMAKVDDSFFHRLEESFLVEEDKKHE | 106 |
| pyogenes | RHPIFGNIVDEVAYHEKYPTIYHLRKKLVDSTDKADLRLIYLALAHMIKFRGHFLIE | |
| Q99ZW2 Cas9 | GDLNPDNSDVDKLFIQLVQTYNQLFEENPINASGVDAKAILSARLSKSRRLENLIAQ | |
| with H840 [symbol] | LPGEKKNGLFGNLIALSLGLTPNFKSNFDLAEDAKLQLSKDTYDDDLDNLLAQIGDQ | |
| wherein X is | YADLFLAAKNLSDAILLSDILRVNTEITKAPLSASMIKRYDEHHQDLTLLKALVRQQ | |
| any | LPEKYKEIFFDQSKNGYAGYIDGGASQEEFYKFIKPILEKMDGTEELLVKLNREDLL | |
| alternate | RKQRTFDNGSIPHQIHLGELHAILRRQEDFYPFLKDNREKIEKILTFRIPYYVGPLA | |
| amino acid | RGNSRFAWMTRKSEETITPWNFEEVVDKGASAQSFIERMTNFDKNLPNEKVLPKHSL | |
| | LYEYFTVYNELTKVKYVTEGMRKPAFLSGEQKKAIVDLLFKTNRKVTVKQLKEDYFK | |
| | KIECFDSVEISGVEDRFNASLGTYHDLLKIIKDKDFLDNEENEDILEDIVLTLTLFE | |
| | DREMIEERLKTYAHLFDDKVMKQLKRRRYTGWGRLSRKLINGIRDKQSGKTILDFLK | |
| | SDGFANRNFMQLIHDDSLTFKEDIQKAQVSGQGDSLHEHIANLAGSPAIKKGILQTV | |
| | KVVDELVKVMGRHKPENIVIEMARENQTTQKGQKNSRERMKRIEEGIKELGSQILKE | |
| | HPVENTQLQNEKLYLYYLQNGRDMYVDQELDINRLSDYDVD [symbol] IVPQSFLKDDSIDNK | |
| | VLTRSDKNRGKSDNVPSEEVVKKMKNYWRQLLNAKLITQRKFDNLTKAERGGLSELD | |
| | KAGFIKRQLVETRQITKHVAQILDSRMNTKYDENDKLIREVKVITLKSKLVSDFRKD | |
| | FQFYKVREINNYHHAHDAYLNAVVGTALIKKYPKLESEFVYGDYKVYDVRKMIAKSE | |
| | QEIGKATAKYFFYSNIMNFFKTEITLANGEIRKRPLIETNGETGEIVWDKGRDFATV | |
| | RKVLSMPQVNIVKKTEVQTGGFSKESILPKRNSDKLIARKKDWDPKKYGGFDSPTVA | |
| | YSVLVVAKVEKGKSKKLKSVKELLGITIMERSSFEKNPIDFLEAKGYKEVKKDLIIK | |
| | LPKYSLFELENGRKRMLASAGELQKGNELALPSKYVNFLYLASHYEKLKGSPEDNEQ | |
| | KQLFVEQHKHYLDEIIEQISEFSKRVILADANLDKVLSAYNKHRDKPIREQAENIIH | |
| | LFTLTNLGAPAAFKYFDTTIDRKRYTSTKEVLDATLIHQSITGLYETRIDLSQLGGD | |
| Cas9 nickase | MDKKYSIGLDIGTNSVGWAVITDEYKVPSKKFKVLGNTDRHSIKKNLIGALLFDSGE | SEQ ID NO: |
| Streptococcus | TAEATRLKRTARRRYTRRKNRICYLQEIFSNEMAKVDDSFFHRLEESFLVEEDKKHE | 107 |
| pyogenes | RHPIFGNIVDEVAYHEKYPTIYHLRKKLVDSTDKADLRLIYLALAHMIKFRGHFLIE | |
| Q99ZW2 Cas9 | GDLNPDNSDVDKLFIQLVQTYNQLFEENPINASGVDAKAILSARLSKSRRLENLIAQ | |
| with H840 [symbol] | LPGEKKNGLFGNLIALSLGLTPNFKSNFDLAEDAKLQLSKDTYDDDLDNLLAQIGDQ | |
| wherein X is | YADLFLAAKNLSDAILLSDILRVNTEITKAPLSASMIKRYDEHHQDLTLLKALVRQQ | |
| any | LPEKYKEIFFDQSKNGYAGYIDGGASQEEFYKFIKPILEKMDGTEELLVKLNREDLL | |
| alternate | RKQRTFDNGSIPHQIHLGELHAILRRQEDFYPFLKDNREKIEKILTFRIPYYVGPLA | |
| amino acid | RGNSRFAWMTRKSEETITPWNFEEVVDKGASAQSFIERMTNFDKNLPNEKVLPKHSL | |
| | LYEYFTVYNELTKVKYVTEGMRKPAFLSGEQKKAIVDLLFKTNRKVTVKQLKEDYFK | |
| | KIECFDSVEISGVEDRFNASLGTYHDLLKIIKDKDFLDNEENEDILEDIVLTLTLFE | |
| | DREMIEERLKTYAHLFDDKVMKQLKRRRYTGWGRLSRKLINGIRDKQSGKTILDFLK | |
| | SDGFANRNFMQLIHDDSLTFKEDIQKAQVSGQGDSLHEHIANLAGSPAIKKGILQTV | |
| | KVVDELVKVMGRHKPENIVIEMARENQTTQKGQKNSRERMKRIEEGIKELGSQILKE | |
| | HPVENTQLQNEKLYLYYLQNGRDMYVDQELDINRLSDYDVD [symbol] IVPQSFLKDDSIDNK | |
| | VLTRSDKNRGKSDNVPSEEVVKKMKNYWRQLLNAKLITQRKFDNLTKAERGGLSELD | |
| | KAGFIKRQLVETRQITKHVAQILDSRMNTKYDENDKLIREVKVITLKSKLVSDFRKD | |
| | FQFYKVREINNYHHAHDAYLNAVVGTALIKKYPKLESEFVYGDYKVYDVRKMIAKSE | |
| | QEIGKATAKYFFYSNIMNFFKTEITLANGEIRKRPLIETNGETGEIVWDKGRDFATV | |
| | RKVLSMPQVNIVKKTEVQTGGFSKESILPKRNSDKLIARKKDWDPKKYGGFDSPTVA | |
| | YSVLVVAKVEKGKSKKLKSVKELLGITIMERSSFEKNPIDFLEAKGYKEVKKDLIIK | |
| | LPKYSLFELENGRKRMLASAGELQKGNELALPSKYVNFLYLASHYEKLKGSPEDNEQ | |
| | KQLFVEQHKHYLDEIIEQISEFSKRVILADANLDKVLSAYNKHRDKPIREQAENIIH | |
| | LFTLTNLGAPAAFKYFDTTIDRKRYTSTKEVLDATLIHQSITGLYETRIDLSQLGGD | |
| Cas9 nickase | MDKKYSIGLDIGTNSVGWAVITDEYKVPSKKFKVLGNTDRHSIKKNLIGALLFDSGE | SEQ ID NO: |
| Streptococcus | TAEATRLKRTARRRYTRRKNRICYLQEIFSNEMAKVDDSFFHRLEESFLVEEDKKHE | 108 |
| pyogenes | RHPIFGNIVDEVAYHEKYPTIYHLRKKLVDSTDKADLRLIYLALAHMIKFRGHFLIE | |
| Q99ZW2 Cas9 | GDLNPDNSDVDKLFIQLVQTYNQLFEENPINASGVDAKAILSARLSKSRRLENLIAQ | |
| with R863X, | LPGEKKNGLFGNLIALSLGLTPNFKSNFDLAEDAKLQLSKDTYDDDLDNLLAQIGDQ | |
| wherein X is | YADLFLAAKNLSDAILLSDILRVNTEITKAPLSASMIKRYDEHHQDLTLLKALVRQQ | |
| any | LPEKYKEIFFDQSKNGYAGYIDGGASQEEFYKFIKPILEKMDGTEELLVKLNREDLL | |
| alternate | RKQRTFDNGSIPHQIHLGELHAILRRQEDFYPFLKDNREKIEKILTFRIPYYVGPLA | |
| amino acid | RGNSRFAWMTRKSEETITPWNFEEVVDKGASAQSFIERMTNFDKNLPNEKVLPKHSL | |
| | LYEYFTVYNELTKVKYVTEGMRKPAFLSGEQKKAIVDLLFKTNRKVTVKQLKEDYFK | |
| | KIECFDSVEISGVEDRFNASLGTYHDLLKIIKDKDFLDNEENEDILEDIVLTLTLFE | |
| | DREMIEERLKTYAHLFDDKVMKQLKRRRYTGWGRLSRKLINGIRDKQSGKTILDFLK | |
| | SDGFANRNFMQLIHDDSLTFKEDIQKAQVSGQGDSLHEHIANLAGSPAIKKGILQTV | |
| | KVVDELVKVMGRHKPENIVIEMARENQTTQKGQKNSRERMKRIEEGIKELGSQILKE | |
| | HPVENTQLQNEKLYLYYLQNGRDMYVDQELDINRLSDYDVDHIVPQSFLKDDSIDNK | |
| | VLTRSDKN [symbol] GKSDNVPSEEVVKKMKNYWRQLLNAKLITQRKFDNLTKAERGGLSELD | |
| | KAGFIKRQLVETRQITKHVAQILDSRMNTKYDENDKLIREVKVITLKSKLVSDFRKD | |
| | FQFYKVREINNYHHAHDAYLNAVVGTALIKKYPKLESEFVYGDYKVYDVRKMIAKSE | |
| | QEIGKATAKYFFYSNIMNFFKTEITLANGEIRKRPLIETNGETGEIVWDKGRDFATV | |
| | RKVLSMPQVNIVKKTEVQTGGFSKESILPKRNSDKLIARKKDWDPKKYGGFDSPTVA | |
| | YSVLVVAKVEKGKSKKLKSVKELLGITIMERSSFEKNPIDFLEAKGYKEVKKDLIIK | |
| | LPKYSLFELENGRKRMLASAGELQKGNELALPSKYVNFLYLASHYEKLKGSPEDNEQ | |
| | KQLFVEQHKHYLDEIIEQISEFSKRVILADANLDKVLSAYNKHRDKPIREQAENIIH | |
| | LFTLTNLGAPAAFKYFDTTIDRKRYTSTKEVLDATLIHQSITGLYETRIDLSQLGGD | |
| Cas9 nickase | MDKKYSIGLDIGTNSVGWAVITDEYKVPSKKFKVLGNTDRHSIKKNLIGALLFDSGE | SEQ ID NO: |
| Streptococcus | TAEATRLKRTARRRYTRRKNRICYLQEIFSNEMAKVDDSFFHRLEESFLVEEDKKHE | 109 |
| pyogenes | RHPIFGNIVDEVAYHEKYPTIYHLRKKLVDSTDKADLRLIYLALAHMIKFRGHFLIE | |
| Q99ZW2 Cas9 | GDLNPDNSDVDKLFIQLVQTYNQLFEENPINASGVDAKAILSARLSKSRRLENLIAQ | |
| with R863 [symbol] | LPGEKKNGLFGNLIALSLGLTPNFKSNFDLAEDAKLQLSKDTYDDDLDNLLAQIGDQ | |
| wherein X is | YADLFLAAKNLSDAILLSDILRVNTEITKAPLSASMIKRYDEHHQDLTLLKALVRQQ | |
| any | LPEKYKEIFFDQSKNGYAGYIDGGASQEEFYKFIKPILEKMDGTEELLVKLNREDLL | |
| alternate | RKQRTFDNGSIPHQIHLGELHAILRRQEDFYPFLKDNREKIEKILTFRIPYYVGPLA | |
| amino acid | RGNSRFAWMTRKSEETITPWNFEEVVDKGASAQSFIERMTNFDKNLPNEKVLPKHSL | |
| | LYEYFTVYNELTKVKYVTEGMRKPAFLSGEQKKAIVDLLFKTNRKVTVKQLKEDYFK | |
| | KIECFDSVEISGVEDRFNASLGTYHDLLKIIKDKDFLDNEENEDILEDIVLTLTLFE | |
| | DREMIEERLKTYAHLFDDKVMKQLKRRRYTGWGRLSRKLINGIRDKQSGKTILDFLK | |
| | SDGFANRNFMQLIHDDSLTFKEDIQKAQVSGQGDSLHEHIANLAGSPAIKKGILQTV | |
| | KVVDELVKVMGRHKPENIVIEMARENQTTQKGQKNSRERMKRIEEGIKELGSQILKE | |
| | HPVENTQLQNEKLYLYYLQNGRDMYVDQELDINRLSDYDVDHIVPQSFLKDDSIDNK | |
| | VLTRSDKN [symbol] GKSDNVPSEEVVKKMKNYWRQLLNAKLITQRKFDNLTKAERGGLSELD | |
| | KAGFIKRQLVETRQITKHVAQILDSRMNTKYDENDKLIREVKVITLKSKLVSDFRKD | |
| | FQFYKVREINNYHHAHDAYLNAVVGTALIKKYPKLESEFVYGDYKVYDVRKMIAKSE | |
| | QEIGKATAKYFFYSNIMNFFKTEITLANGEIRKRPLIETNGETGEIVWDKGRDFATV | |
| | RKVLSMPQVNIVKKTEVQTGGFSKESILPKRNSDKLIARKKDWDPKKYGGFDSPTVA | |
| | YSVLVVAKVEKGKSKKLKSVKELLGITIMERSSFEKNPIDFLEAKGYKEVKKDLIIK | |
| | LPKYSLFELENGRKRMLASAGELQKGNELALPSKYVNFLYLASHYEKLKGSPEDNEQ | |
| | KQLFVEQHKHYLDEIIEQISEFSKRVILADANLDKVLSAYNKHRDKPIREQAENIIH | |
| | LFTLTNLGAPAAFKYFDTTIDRKRYTSTKEVLDATLIHQSITGLYETRIDLSQLGGD | |

[0157] In some embodiments, the N-terminal methionine is removed from a Cas9 nickase, or from any Cas9 variant, ortholog, or equivalent disclosed or contemplated herein. For example, methionine-minus Cas9 nickases include the following sequences, or a variant thereof having an amino acid sequence that has at least 80%, at least 85%, at least 90%, at least 95%, or at least 99% sequence identity thereto.

| Description | Sequence |
|---|---|
| Cas9 nickase | DKKYSIGLDIGTNSVGWAVITDEYKVPSKKFKVLGNTDRHSIKKNLIGALLFDSGETAEATRLKRTARRR |
| (Met minus) | YTRRKNRICYLQEIFSNEMAKVDDSFFHRLEESFLVEEDKKHERHPIFGNIVDEVAYHEKYPTIYHLRKK |
| Streptococcus | LVDSTDKADLRLIYLALAHMIKFRGHFLIEGDLNPDNSDVDKLFIQLVQTYNQLFEENPINASGVDAKAI |
| pyogenes | LSARLSKSRRLENLIAQLPGEKKNGLFGNLIALSLGLTPNFKSNFDLAEDAKLQLSKDTYDDDLDNLLAQ |
| Q99ZW2 Cas9 | IGDQYADLFLAAKNLSDAILLSDILRVNTEITKAPLSASMIKRYDEHHQDLTLLKALVRQQLPEKYKEIF |
| with H840 [symbol] | FDQSKNGYAGYIDGGASQEEFYKFIKPILEKMDGTEELLVKLNREDLLRKQRTFDNGSIPHQIHLGELHA |
| wherein X is | ILRRQEDFYPFLKDNREKIEKILTFRIPYYVGPLARGNSRFAWMTRKSEETITPWNFEEVVDKGASAQSF |
| any | IERMTNFDKNLPNEKVLPKHSLLYEYFTVYNELTKVKYVTEGMRKPAFLSGEQKKAIVDLLFKTNRKVTV |
| alternate | KQLKEDYFKKIECFDSVEISGVEDRFNASLGTYHDLLKIIKDKDFLDNEENEDILEDIVLTLTLFEDREM |
| amino acid | IEERLKTYAHLFDDKVMKQLKRRRYTGWGRLSRKLINGIRDKQSGKTILDFLKSDGFANRNFMQLIHDDS |
| | LTFKEDIQKAQVSGQGDSLHEHIANLAGSPAIKKGILQTVKVVDELVKVMGRHKPENIVIEMARENQTTQ |
| | KGQKNSRERMKRIEEGIKELGSQILKEHPVENTQLQNEKLYLYYLQNGRDMYVDQELDINRLSDYDVD [symbol] I |
| | VPQSFLKDDSIDNKVLTRSDKNRGKSDNVPSEEVVKKMKNYWRQLLNAKLITQRKFDNLTKAERGGLSEL |
| | DKAGFIKRQLVETRQITKHVAQILDSRMNTKYDENDKLIREVKVITLKSKLVSDFRKDFQFYKVREINNY |
| | HHAHDAYLNAVVGTALIKKYPKLESEFVYGDYKVYDVRKMIAKSEQEIGKATAKYFFYSNIMNFFKTEIT |
| | LANGEIRKRPLIETNGETGEIVWDKGRDFATVRKVLSMPQVNIVKKTEVQTGGFSKESILPKRNSDKLIA |
| | RKKDWDPKKYGGFDSPTVAYSVLVVAKVEKGKSKKLKSVKELLGITIMERSSFEKNPIDFLEAKGYKEVK |
| | KDLIIKLPKYSLFELENGRKRMLASAGELQKGNELALPSKYVNFLYLASHYEKLKGSPEDNEQKQLFVEQ |
| | HKHYLDEIIEQISEFSKRVILADANLDKVLSAYNKHRDKPIREQAENIIHLFTLTNLGAPAAFKYFDTTI |
| | DRKRYTSTKEVLDATLIHQSITGLYETRIDLSQLGGD (SEQ ID NO: 110) |
| Cas9 nickase | DKKYSIGLDIGTNSVGWAVITDEYKVPSKKFKVLGNTDRHSIKKNLIGALLFDSGETAEATRLKRTARRR |
| Met minus) | YTRRKNRICYLQEIFSNEMAKVDDSFFHRLEESFLVEEDKKHERHPIFGNIVDEVAYHEKYPTIYHLRKK |
| Streptococcus | LVDSTDKADLRLIYLALAHMIKFRGHFLIEGDLNPDNSDVDKLFIQLVQTYNQLFEENPINASGVDAKAI |
| pyogenes | LSARLSKSRRLENLIAQLPGEKKNGLFGNLIALSLGLTPNFKSNFDLAEDAKLQLSKDTYDDDLDNLLAQ |
| Q99ZW2 Cas9 | IGDQYADLFLAAKNLSDAILLSDILRVNTEITKAPLSASMIKRYDEHHQDLTLLKALVRQQLPEKYKEIF |
| with H840 [symbol] | FDQSKNGYAGYIDGGASQEEFYKFIKPILEKMDGTEELLVKLNREDLLRKQRTFDNGSIPHQIHLGELHA |
| wherein X is | ILRRQEDFYPFLKDNREKIEKILTFRIPYYVGPLARGNSRFAWMTRKSEETITPWNFEEVVDKGASAQSF |
| any | IERMTNFDKNLPNEKVLPKHSLLYEYFTVYNELTKVKYVTEGMRKPAFLSGEQKKAIVDLLFKTNRKVTV |
| alternate | KQLKEDYFKKIECFDSVEISGVEDRFNASLGTYHDLLKIIKDKDFLDNEENEDILEDIVLTLTLFEDREM |
| amino acid | IEERLKTYAHLFDDKVMKQLKRRRYTGWGRLSRKLINGIRDKQSGKTILDFLKSDGFANRNFMQLIHDDS |
| | LTFKEDIQKAQVSGQGDSLHEHIANLAGSPAIKKGILQTVKVVDELVKVMGRHKPENIVIEMARENQTTQ |
| | KGQKNSRERMKRIEEGIKELGSQILKEHPVENTQLQNEKLYLYYLQNGRDMYVDQELDINRLSDYDVD [symbol] I |
| | VPQSFLKDDSIDNKVLTRSDKNRGKSDNVPSEEVVKKMKNYWRQLLNAKLITQRKFDNLTKAERGGLSEL |
| | DKAGFIKRQLVETRQITKHVAQILDSRMNTKYDENDKLIREVKVITLKSKLVSDFRKDFQFYKVREINNY |
| | HHAHDAYLNAVVGTALIKKYPKLESEFVYGDYKVYDVRKMIAKSEQEIGKATAKYFFYSNIMNFFKTEIT |
| | LANGEIRKRPLIETNGETGEIVWDKGRDFATVRKVLSMPQVNIVKKTEVQTGGFSKESILPKRNSDKLIA |
| | RKKDWDPKKYGGFDSPTVAYSVLVVAKVEKGKSKKLKSVKELLGITIMERSSFEKNPIDFLEAKGYKEVK |
| | KDLIIKLPKYSLFELENGRKRMLASAGELQKGNELALPSKYVNFLYLASHYEKLKGSPEDNEQKQLFVEQ |
| | HKHYLDEIIEQISEFSKRVILADANLDKVLSAYNKHRDKPIREQAENIIHLFTLTNLGAPAAFKYFDTTI |
| | DRKRYTSTKEVLDATLIHQSITGLYETRIDLSQLGGD (SEQ ID NO: 111) |
| Cas9 nickase | DKKYSIGLDIGTNSVGWAVITDEYKVPSKKFKVLGNTDRHSIKKNLIGALLFDSGETAEATRLKRTARRR |
| (Met minus) | YTRRKNRICYLQEIFSNEMAKVDDSFFHRLEESFLVEEDKKHERHPIFGNIVDEVAYHEKYPTIYHLRKK |
| Streptococcus | LVDSTDKADLRLIYLALAHMIKFRGHFLIEGDLNPDNSDVDKLFIQLVQTYNQLFEENPINASGVDAKAI |
| pyogenes | LSARLSKSRRLENLIAQLPGEKKNGLFGNLIALSLGLTPNFKSNFDLAEDAKLQLSKDTYDDDLDNLLAQ |
| Q99ZW2 Cas9 | IGDQYADLFLAAKNLSDAILLSDILRVNTEITKAPLSASMIKRYDEHHQDLTLLKALVRQQLPEKYKEIF |
| with R863X, | FDQSKNGYAGYIDGGASQEEFYKFIKPILEKMDGTEELLVKLNREDLLRKQRTFDNGSIPHQIHLGELHA |
| wherein X is | ILRRQEDFYPFLKDNREKIEKILTFRIPYYVGPLARGNSRFAWMTRKSEETITPWNFEEVVDKGASAQSF |
| any | IERMTNFDKNLPNEKVLPKHSLLYEYFTVYNELTKVKYVTEGMRKPAFLSGEQKKAIVDLLFKTNRKVTV |
| alternate | KQLKEDYFKKIECFDSVEISGVEDRFNASLGTYHDLLKIIKDKDFLDNEENEDILEDIVLTLTLFEDREM |
| amino acid | IEERLKTYAHLFDDKVMKQLKRRRYTGWGRLSRKLINGIRDKQSGKTILDFLKSDGFANRNFMQLIHDDS |
| | LTFKEDIQKAQVSGQGDSLHEHIANLAGSPAIKKGILQTVKVVDELVKVMGRHKPENIVIEMARENQTTQ |
| | KGQKNSRERMKRIEEGIKELGSQILKEHPVENTQLQNEKLYLYYLQNGRDMYVDQELDINRLSDYDVDHI |
| | VPQSFLKDDSIDNKVLTRSDKN [symbol] GKSDNVPSEEVVKKMKNYWRQLLNAKLITQRKFDNLTKAERGGLSEL |
| | DKAGFIKRQLVETRQITKHVAQILDSRMNTKYDENDKLIREVKVITLKSKLVSDFRKDFQFYKVREINNY |
| | HHAHDAYLNAVVGTALIKKYPKLESEFVYGDYKVYDVRKMIAKSEQEIGKATAKYFFYSNIMNFFKTEIT |
| | LANGEIRKRPLIETNGETGEIVWDKGRDFATVRKVLSMPQVNIVKKTEVQTGGFSKESILPKRNSDKLIA |
| | RKKDWDPKKYGGFDSPTVAYSVLVVAKVEKGKSKKLKSVKELLGITIMERSSFEKNPIDFLEAKGYKEVK |
| | KDLIIKLPKYSLFELENGRKRMLASAGELQKGNELALPSKYVNFLYLASHYEKLKGSPEDNEQKQLFVEQ |
| | HKHYLDEIIEQISEFSKRVILADANLDKVLSAYNKHRDKPIREQAENIIHLFTLTNLGAPAAFKYFDTTI |
| | DRKRYTSTKEVLDATLIHQSITGLYETRIDLSQLGGD (SEQ ID NO: 112) |
| Cas9 nickase | DKKYSIGLDIGTNSVGWAVITDEYKVPSKKFKVLGNTDRHSIKKNLIGALLFDSGETAEATRLKRTARRR |
| (Met minus) | YTRRKNRICYLQEIFSNEMAKVDDSFFHRLEESFLVEEDKKHERHPIFGNIVDEVAYHEKYPTIYHLRKK |
| Streptococcus | LVDSTDKADLRLIYLALAHMIKFRGHFLIEGDLNPDNSDVDKLFIQLVQTYNQLFEENPINASGVDAKAI |
| pyogenes | LSARLSKSRRLENLIAQLPGEKKNGLFGNLIALSLGLTPNFKSNFDLAEDAKLQLSKDTYDDDLDNLLAQ |
| Q99ZW2 Cas9 | IGDQYADLFLAAKNLSDAILLSDILRVNTEITKAPLSASMIKRYDEHHQDLTLLKALVRQQLPEKYKEIF |
| with R863 [symbol] | FDQSKNGYAGYIDGGASQEEFYKFIKPILEKMDGTEELLVKLNREDLLRKQRTFDNGSIPHQIHLGELHA |
| wherein X is | ILRRQEDFYPFLKDNREKIEKILTFRIPYYVGPLARGNSRFAWMTRKSEETITPWNFEEVVDKGASAQSF |
| any | IERMTNFDKNLPNEKVLPKHSLLYEYFTVYNELTKVKYVTEGMRKPAFLSGEQKKAIVDLLFKTNRKVTV |
| alternate | KQLKEDYFKKIECFDSVEISGVEDRFNASLGTYHDLLKIIKDKDFLDNEENEDILEDIVLTLTLFEDREM |
| amino acid | IEERLKTYAHLFDDKVMKQLKRRRYTGWGRLSRKLINGIRDKQSGKTILDFLKSDGFANRNFMQLIHDDS |
| | LTFKEDIQKAQVSGQGDSLHEHIANLAGSPAIKKGILQTVKVVDELVKVMGRHKPENIVIEMARENQTTQ |
| | KGQKNSRERMKRIEEGIKELGSQILKEHPVENTQLQNEKLYLYYLQNGRDMYVDQELDINRLSDYDVDHI |
| | VPQSFLKDDSIDNKVLTRSDKN [symbol] GKSDNVPSEEVVKKMKNYWRQLLNAKLITQRKFDNLTKAERGGLSEL |
| | DKAGFIKRQLVETRQITKHVAQILDSRMNTKYDENDKLIREVKVITLKSKLVSDFRKDFQFYKVREINNY |
| | HHAHDAYLNAVVGTALIKKYPKLESEFVYGDYKVYDVRKMIAKSEQEIGKATAKYFFYSNIMNFFKTEIT |
| | LANGEIRKRPLIETNGETGEIVWDKGRDFATVRKVLSMPQVNIVKKTEVQTGGFSKESILPKRNSDKLIA |
| | RKKDWDPKKYGGFDSPTVAYSVLVVAKVEKGKSKKLKSVKELLGITIMERSSFEKNPIDFLEAKGYKEVK |
| | KDLIIKLPKYSLFELENGRKRMLASAGELQKGNELALPSKYVNFLYLASHYEKLKGSPEDNEQKQLFVEQ |
| | HKHYLDEIIEQISEFSKRVILADANLDKVLSAYNKHRDKPIREQAENIIHLFTLTNLGAPAAFKYFDTTI |
| | DRKRYTSTKEVLDATLIHQSITGLYETRIDLSQLGGD (SEQ ID NO: 113) |

[0158] (v) Other Cas9 Variants

[0159] Besides dead Cas9 and Cas9 nickase variants, the Cas9 proteins used herein may also include other “Cas9 variants” having at least about 70% identical, at least about 80% identical, at least about 90% identical, at least about 95% identical, at least about 96% identical, at least about 97% identical, at least about 98% identical, at least about 99% identical, at least about 99.5% identical, or at least about 99.9% identical to any reference Cas9 protein, including any wild type Cas9, or mutant Cas9 (e.g., a dead Cas9 or Cas9 nickase), or fragment Cas9, or circular permutant Cas9, or other variant of Cas9 disclosed herein or known in the art. In some embodiments, a Cas9 variant may have 1, 2, 3, 4, 5, 6, 7, 8, 9, 10, 11, 12, 13, 14, 15, 16, 17, 18, 19, 20, 21, 22, 21, 24, 25, 26, 27, 28, 29, 30, 31, 32, 33, 34, 35, 36, 37, 38, 39, 40, 41, 42, 43, 44, 45, 46, 47, 48, 49, 50 or more amino acid changes compared to a reference Cas9. In some embodiments, the Cas9 variant comprises a fragment of a reference Cas9 (e.g., a gRNA binding domain or a DNA-cleavage domain), such that the fragment is at least about 70% identical, at least about 80% identical, at least about 90% identical, at least about 95% identical, at least about 96% identical, at least about 97% identical, at least about 98% identical, at least about 99% identical, at least about 99.5% identical, or at least about 99.9% identical to the corresponding fragment of wild type Cas9. In some embodiments, the fragment is at least 30%, at least 35%, at least 40%, at least 45%, at least 50%, at least 55%, at least 60%, at least 65%, at least 70%, at least 75%, at least 80%, at least 85%, at least 90%, at least 95% identical, at least 96%, at least 97%, at least 98%, at least 99%, or at least 99.5% of the amino acid length of a corresponding wild type Cas9 (e.g., SEQ ID NO: 74).

[0160] In some embodiments, the disclosure also may utilize Cas9 fragments which retain their functionality and which are fragments of any herein disclosed Cas9 protein. In some embodiments, the Cas9 fragment is at least 100 amino acids in length. In some embodiments, the fragment is at least 100, 150, 200, 250, 300, 350, 400, 450, 500, 550, 600, 650, 700, 750, 800, 850, 900, 950, 1000, 1050, 1100, 1150, 1200, 1250, or at least 1300 amino acids in length.

[0161] In various embodiments, the base editors disclosed herein may comprise one of the Cas9 variants described as follows, or a Cas9 variant thereof having at least about 70% identical, at least about 80% identical, at least about 90% identical, at least about 95% identical, at least about 96% identical, at least about 97% identical, at least about 98% identical, at least about 99% identical, at least about 99.5% identical, or at least about 99.9% identical to any reference Cas9 variants.

[0162] (vi) Small-Sized Cas9 Variants

[0163] In some embodiments, the base editors contemplated herein can include a Cas9 protein that is of smaller molecular weight than the canonical SpCas9 sequence. In some embodiments, the smaller-sized Cas9 variants may facilitate delivery to cells, e.g., by an expression vector, nanoparticle, or other means of delivery. In certain embodiments, the smaller-sized Cas9 variants can include enzymes categorized as type II enzymes of the Class 2 CRISPR-Cas systems. In some embodiments, the smaller-sized Cas9 variants can include enzymes categorized as type V enzymes of the Class 2 CRISPR-Cas systems. In other embodiments, the smaller-sized Cas9 variants can include enzymes categorized as type VI enzymes of the Class 2 CRISPR-Cas systems.

[0164] The canonical SpCas9 protein is 1368 amino acids in length and has a predicted molecular weight of 158 kilodaltons. The term “small-sized Cas9 variant”, as used herein, refers to any Cas9 variant—naturally occurring, engineered, or otherwise—that is less than at least 1300 amino acids, or at least less than 1290 amino acids, or than less than 1280 amino acids, or less than 1270 amino acid, or less than 1260 amino acid, or less than 1250 amino acids, or less than 1240 amino acids, or less than 1230 amino acids, or less than 1220 amino acids, or less than 1210 amino acids, or less than 1200 amino acids, or less than 1190 amino acids, or less than 1180 amino acids, or less than 1170 amino acids, or less than 1160 amino acids, or less than 1150 amino acids, or less than 1140 amino acids, or less than 1130 amino acids, or less than 1120 amino acids, or less than 1110 amino acids, or less than 1100 amino acids, or less than 1050 amino acids, or less than 1000 amino acids, or less than 950 amino acids, or less than 900 amino acids, or less than 850 amino acids, or less than 800 amino acids, or less than 750 amino acids, or less than 700 amino acids, or less than 650 amino acids, or less than 600 amino acids, or less than 550 amino acids, or less than 500 amino acids, but at least larger than about 400 amino acids and retaining the required functions of the Cas9 protein. The Cas9 variants can include those categorized as type II, type V, or type VI enzymes of the Class 2 CRISPR-Cas system.

[0165] In various embodiments, the base editors disclosed herein may comprise one of the small-sized Cas9 variants described as follows, or a Cas9 variant thereof having at least about 70% identical, at least about 80% identical, at least about 90% identical, at least about 95% identical, at least about 96% identical, at least about 97% identical, at least about 98% identical, at least about 99% identical, at least about 99.5% identical, or at least about 99.9% identical to any reference small-sized Cas9 protein.

| Description | Sequence | SEQ ID NO: |
|---|---|---|
| SaCas9 | MGKRNYILGLDIGITSVGYGIIDYETRDVIDAGVRLFKEANVENNEGRRSKRGARRL | SEQ ID NO: |
| Staphylococcus | KRRRRHRIQRVKKLLFDYNLLTDHSELSGINPYEARVKGLSQKLSEEEFSAALLHLA | 114 |
| aureus | KRRGVHNVNEVEEDTGNELSTKEQISRNSKALEEKYVAELQLERLKKDGEVRGSINR | |
| 1053 AA | FKTSDYVKEAKQLLKVQKAYHQLDQSFIDTYIDLLETRRTYYEGPGEGSPFGWKDIK | |
| 123 kDa | EWYEMLMGHCTYFPEELRSVKYAYNADLYNALNDLNNLVITRDENEKLEYYEKFQII | |
| | ENVFKQKKKPTLKQIAKEILVNEEDIKGYRVTSTGKPEFTNLKVYHDIKDITARKEI | |
| | IENAELLDQIAKILTIYQSSEDIQEELTNLNSELTQEEIEQISNLKGYTGTHNLSLK | |
| | AINLILDELWHTNDNQIAIFNRLKLVPKKVDLSQQKEIPTTLVDDFILSPVVKRSFI | |
| | QSIKVINAIIKKYGLPNDIIIELAREKNSKDAQKMINEMQKRNRQTNERIEEIIRTT | |
| | GKENAKYLIEKIKLHDMQEGKCLYSLEAIPLEDLLNNPFNYEVDHIIPRSVSFDNSF | |
| | NNKVLVKQEENSKKGNRTPFQYLSSSDSKISYETFKKHILNLAKGKGRISKTKKEYL | |
| | LEERDINRFSVQKDFINRNLVDTRYATRGLMNLLRSYFRVNNLDVKVKSINGGFTSF | |
| | LRRKWKFKKERNKGYKHHAEDALIIANADFIFKEWKKLDKAKKVMENQMFEEKQAES | |
| | MPEIETEQEYKEIFITPHQIKHIKDFKDYKYSHRVDKKPNRKLINDTLYSTRKDDKG | |
| | NTLIVNNLNGLYDKDNDKLKKLINKSPEKLLMYHHDPQTYQKLKLIMEQYGDEKNPL | |
| | YKYYEETGNYLTKYSKKDNGPVIKKIKYYGNKLNAHLDITDDYPNSRNKVVKLSLKP | |
| | YRFDVYLDNGVYKFVTVKNLDVIKKENYYEVNSKCYEEAKKLKKISNQAEFIASFYK | |
| | NDLIKINGELYRVIGVNNDLLNRIEVNMIDITYREYLENMNDKRPPHIIKTIASKTQ | |
| | SIKKYSTDILGNLYEVKSKKHPQIIKK | |
| NmeCas 9 | MAAFKPNSINYILGLDIGIASVGWAMVEIDEEENPIRLIDLGVRVFERAEVPKTGDS | SEQ ID NO: |
| N. | LAMARRLARSVRRLTRRRAHRLLRTRRLLKREGVLQAANFDENGLIKSLPNTPWQLR | 115 |
| meningitidis | AAALDRKLTPLEWSAVLLHLIKHRGYLSQRKNEGETADKELGALLKGVAGNAHALQT | |
| 1083 AA | GDFRTPAELALNKFEKESGHIRNQRSDYSHTFSRKDLQAELILLFEKQKEFGNPHVS | |
| 124.5 kDa | GGLKEGIETLLMTQRPALSGDAVQKMLGHCTFEPAEPKAAKNTYTAERFIWLTKLNN | |
| | LRILEQGSERPLTDTERATLMDEPYRKSKLTYAQARKLLGLEDTAFFKGLRYGKDNA | |
| | EASTLMEMKAYHAISRALEKEGLKDKKSPLNLSPELQDEIGTAFSLFKTDEDITGRL | |
| | KDRIQPEILEALLKHISFDKFVQISLKALRRIVPLMEQGKRYDEACAEIYGDHYGKK | |
| | NTEEKIYLPPIPADEIRNPVVLRALSQARKVINGVVRRYGSPARIHIETAREVGKSF | |
| | KDRKEIEKRQEENRKDREKAAAKFREYFPNFVGEPKSKDILKLRLYEQQHGKCLYSG | |
| | KEINLGRLNEKGYVEIDAALPFSRTWDDSFNNKVLVLGSENQNKGNQTPYEYFNGKD | |
| | NSREWQEFKARVETSRFPRSKKQRILLQKFDEDGFKERNLNDTRYVNRFLCQFVADR | |
| | MRLTGKGKKRVFASNGQITNLLRGFWGLRKVRAENDRHHALDAVVVACSTVAMQQKI | |
| | TRFVRYKEMNAFDGKTIDKETGEVLHQKTHFPQPWEFFAQEVMIRVFGKPDGKPEFE | |
| | EADTLEKLRTLLAEKLSSRPEAVHEYVTPLFVSRAPNRKMSGQGHMETVKSAKRLDE | |
| | GVSVLRVPLTQLKLKDLEKMVNREREPKLYEALKARLEAHKDDPAKAFAEPFYKYDK | |
| | AGNRTQQVKAVRVEQVQKTGVWVRNHNGIADNATMVRVDVFEKGDKYYLVPIYSWQV | |
| | AKGILPDRAVVQGKDEEDWQLIDDSFNFKFSLHPNDLVEVITKKARMFGYFASCHRG | |
| | TGNINIRIHDLDHKIGKNGILEGIGVKTALSFQKYQIDELGKEIRPCRLKKRPPVR | |
| CjCas9 | MARILAFDIGISSIGWAFSENDELKDCGVRIFTKVENPKTGESLALPRRLARSARKR | SEQ ID NO: |
| C. jejuni | LARRKARLNHLKHLIANEFKLNYEDYQSFDESLAKAYKGSLISPYELRFRALNELLS | 116 |
| 984 AA | KQDFARVILHIAKRRGYDDIKNSDDKEKGAILKAIKQNEEKLANYQSVGEYLYKEYF | |
| 114.9 kDa | QKFKENSKEFTNVRNKKESYERCIAQSFLKDELKLIFKKQREFGFSFSKKFEEEVLS | |
| | VAFYKRALKDFSHLVGNCSFFTDEKRAPKNSPLAFMFVALTRIINLLNNLKNTEGIL | |
| | YTKDDLNALLNEVLKNGTLTYKQTKKLLGLSDDYEFKGEKGTYFIEFKKYKEFIKAL | |
| | GEHNLSQDDLNEIAKDITLIKDEIKLKKALAKYDLNQNQIDSLSKLEFKDHLNISFK | |
| | ALKLVTPLMLEGKKYDEACNELNLKVAINEDKKDFLPAFNETYYKDEVTNPVVLRAI | |
| | KEYRKVLNALLKKYGKVHKINIELAREVGKNHSQRAKIEKEQNENYKAKKDAELECE | |
| | KLGLKINSKNILKLRLFKEQKEFCAYSGEKIKISDLQDEKMLEIDHIYPYSRSFDDS | |
| | YMNKVLVFTKQNQEKLNQTPFEAFGNDSAKWQKIEVLAKNLPTKKQKRILDKNYKDK | |
| | EQKNFKDRNLNDTRYIARLVLNYTKDYLDFLPLSDDENTKLNDTQKGSKVHVEAKSG | |
| | MLTSALRHTWGFSAKDRNNHLHHAIDAVIIAYANNSIVKAFSDFKKEQESNSAELYA | |
| | KKISELDYKNKRKFFEPFSGFRQKVLDKIDEIFVSKPERKKPSGALHEETFRKEEEF | |
| | YQSYGGKEGVLKALELGKIRKVNGKIVKNGDMFRVDIFKHKKTNKFYAVPIYTMDFA | |
| | LKVLPNKAVARSKKGEIKDWILMDENYEFCFSLYKDSLILIQTKDMQEPEFVYYNAF | |
| | TSSTVSLIVSKHDNKFETLSKNQKILFKNANEKEVIAKSIGIQNLKVFEKYIVSALG | |
| | EVTKAEFRQREDFKK | |
| GeoCas 9 | MRYKIGLDIGITSVGWAVMNLDIPRIEDLGVRIFDRAENPQTGESLALPRRLARSAR | SEQ ID NO: |
| G. | RRLRRRKHRLERIRRLVIREGILTKEELDKLFEEKHEIDVWQLRVEALDRKLNNDEL | 117 |
| stearothermo- | ARVLLHLAKRRGFKSNRKSERSNKENSTMLKHIEENRAILSSYRTVGEMIVKDPKFA | |
| philus | LHKRNKGENYTNTIARDDLEREIRLIFSKQREFGNMSCTEEFENEYITIWASQRPVA | |
| 1087 AA | SKDDIEKKVGFCTFEPKEKRAPKATYTFQSFIAWEHINKLRLISPSGARGLTDEERR | |
| 127 kDa | LLYEQAFQKNKITYHDIRTLLHLPDDTYFKGIVYDRGESRKQNENIRFLELDAYHQI | |
| | RKAVDKVYGKGKSSSFLPIDFDTFGYALTLFKDDADIHSYLRNEYEQNGKRMPNLAN | |
| | KVYDNELIEELLNLSFTKFGHLSLKALRSILPYMEQGEVYSSACERAGYTFTGPKKK | |
| | QKTMLLPNIPPIANPVVMRALTQARKVVNAIIKKYGSPVSIHIELARDLSQTFDERR | |
| | KTKKEQDENRKKNETAIRQLMEYGLTLNPTGHDIVKFKLWSEQNGRCAYSLQPIEIE | |
| | RLLEPGYVEVDHVIPYSRSLDDSYTNKVLVLTRENREKGNRIPAEYLGVGTERWQQF | |
| | ETFVLTNKQFSKKKRDRLLRLHYDENEETEFKNRNLNDTRYISRFFANFIREHLKFA | |
| | ESDDKQKVYTVNGRVTAHLRSRWEFNKNREESDLHHAVDAVIVACTTPSDIAKVTAF | |
| | YQRREQNKELAKKTEPHFPQPWPHFADELRARLSKHPKESIKALNLGNYDDQKLESL | |
| | QPVFVSRMPKRSVTGAAHQETLRRYVGIDERSGKIQTVVKTKLSEIKLDASGHFPMY | |
| | GKESDPRTYEAIRQRLLEHNNDPKKAFQEPLYKPKKNGEPGPVIRTVKIIDTKNQVI | |
| | PLNDGKTVAYNSNIVRVDVFEKDGKYYCVPVYTMDIMKGILPNKAIEPNKPYSEWKE | |
| | MTEDYTFRFSLYPNDLIRIELPREKTVKTAAGEEINVKDVFVYYKTIDSANGGLELI | |
| | SHDHRFSLRGVGSRTLKRFEKYQVDVLGNIYKVRGEKRVGLASSAHSKPGKTIRPLQ | |
| | STRD | |
| LbaCas12a | MSKLEKFTNCYSLSKTLRFKAIPVGKTQENIDNKRLLVEDEKRAEDYKGVKKLLDRY | SEQ ID NO: |
| L. bacterium | YLSFINDVLHSIKLKNLNNYISLFRKKTRTEKENKELENLEINLRKEIAKAFKGNEG | 118 |
| 1228 AA | YKSLFKKDIIETILPEFLDDKDEIALVNSFNGFTTAFTGFFDNRENMFSEEAKSTSI | |
| 143.9 kDa | AFRCINENLTRYISNMDIFEKVDAIFDKHEVQEIKEKILNSDYDVEDFFEGEFFNFV | |
| | LTQEGIDVYNAIIGGFVTESGEKIKGLNEYINLYNQKTKQKLPKFKPLYKQVLSDRE | |
| | SLSFYGEGYTSDEEVLEVFRNTLNKNSEIFSSIKKLEKLFKNFDEYSSAGIFVKNGP | |
| | AISTISKDIFGEWNVIRDKWNAEYDDIHLKKKAVVTEKYEDDRRKSFKKIGSFSLEQ | |
| | LQEYADADLSVVEKLKEIIIQKVDEIYKVYGSSEKLFDADFVLEKSLKKNDAVVAIM | |
| | KDLLDSVKSFENYIKAFFGEGKETNRDESFYGDFVLAYDILLKVDHIYDAIRNYVTQ | |
| | KPYSKDKFKLYFQNPQFMGGWDKDKETDYRATILRYGSKYYLAIMDKKYAKCLQKID | |
| | KDDVNGNYEKINYKLLPGPNKMLPKVFFSKKWMAYYNPSEDIQKIYKNGTFKKGDMF | |
| | NLNDCHKLIDFFKDSISRYPKWSNAYDFNFSETEKYKDIAGFYREVEEQGYKVSFES | |
| | ASKKEVDKLVEEGKLYMFQIYNKDFSDKSHGTPNLHTMYFKLLFDENNHGQIRLSGG | |
| | AELFMRRASLKKEELVVHPANSPIANKNPDNPKKTTTLSYDVYKDKRFSEDQYELHI | |
| | PIAINKCPKNIFKINTEVRVLLKHDDNPYVIGIDRGERNLLYIVVVDGKGNIVEQYS | |
| | LNEIINNFNGIRIKTDYHSLLDKKEKERFEARQNWTSIENIKELKAGYISQVVHKIC | |
| | ELVEKYDAVIALEDLNSGFKNSRVKVEKQVYQKFEKMLIDKLNYMVDKKSNPCATGG | |
| | ALKGYQITNKFESFKSMSTQNGFIFYIPAWLTSKIDPSTGFVNLLKTKYTSIADSKK | |
| | FISSFDRIMYVPEEDLFEFALDYKNFSRTDADYIKKWKLYSYGNRIRIFRNPKKNNV | |
| | FDWEEVCLTSAYKELFNKYGINYQQGDIRALLCEQSDKAFYSSFMALMSLMLQMRNS | |
| | ITGRTDVDFLISPVKNSDGIFYDSRNYEAQENAILPKNADANGAYNIARKVLWAIGQ | |
| | FKKAEDEKLDKVKIAISNKEWLEYAQTSVKH | |
| BhCas12b | MATRSFILKIEPNEEVKKGLWKTHEVLNHGIAYYMNILKLIRQEAIYEHHEQDPKNP | SEQ ID NO: |
| B. hisashii | KKVSKAEIQAELWDFVLKMQKCNSFTHEVDKDEVFNILRELYEELVPSSVEKKGEAN | 119 |
| 1108 AA | QLSNKFLYPLVDPNSQSGKGTASSGRKPRWYNLKIAGDPSWEEEKKKWEEDKKKDPL | |
| 130.4 kDa | AKILGKLAEYGLIPLFIPYTDSNEPIVKEIKWMEKSRNQSVRRLDKDMFIQALERFL | |
| | SWESWNLKVKEEYEKVEKEYKTLEERIKEDIQALKALEQYEKERQEQLLRDTLNTNE | |
| | YRLSKRGLRGWREIIQKWLKMDENEPSEKYLEVFKDYQRKHPREAGDYSVYEFLSKK | |
| | ENHFIWRNHPEYPYLYATFCEIDKKKKDAKQQATFTLADPINHPLWVRFEERSGSNL | |
| | NKYRILTEQLHTEKLKKKLTVQLDRLIYPTESGGWEEKGKVDIVLLPSRQFYNQIFL | |
| | DIEEKGKHAFTYKDESIKFPLKGTLGGARVQFDRDHLRRYPHKVESGNVGRIYFNMT | |
| | VNIEPTESPVSKSLKIHRDDFPKVVNFKPKELTEWIKDSKGKKLKSGIESLEIGLRV | |
| | MSIDLGQRQAAAASIFEVVDQKPDIEGKLFFPIKGTELYAVHRASFNIKLPGETLVK | |
| | SREVLRKAREDNLKLMNQKLNFLRNVLHFQQFEDITEREKRVTKWISRQENSDVPLV | |
| | YQDELIQIRELMYKPYKDWVAFLKQLHKRLEVEIGKEVKHWRKSLSDGRKGLYGISL | |
| | KNIDEIDRTRKFLLRWSLRPTEPGEVRRLEPGQRFAIDQLNHLNALKEDRLKKMANT | |
| | IIMHALGYCYDVRKKKWQAKNPACQIILFEDLSNYNPYEERSRFENSKLMKWSRREI | |
| | PRQVALQGEIYGLQVGEVGAQFSSRFHAKTGSPGIRCSVVTKEKLQDNRFFKNLQRE | |
| | GRLTLDKIAVLKEGDLYPDKGGEKFISLSKDRKCVTTHADINAAQNLQKRFWTRTHG | |
| | FYKVYCKAYQVDGQTVYIPESKDQKQKIIEEFGEGYFILKDGVYEWVNAGKLKIKKG | |
| | SSKQSSSELVDSDILKDSFDLASELKGEKLMLYRDPSGNVFPSDKWMAAGVFFGKLE | |
| | RILISKLTNQYSISTIEDDSSKQSM | |

[0166] (vii) Cas9 Equivalents

[0167] In some embodiments, the base editors described herein can include any Cas9 equivalent. As used herein, the term “Cas9 equivalent” is a broad term that encompasses any napDNAbp protein that serves the same function as Cas9 in the present base editors despite that its amino acid primary sequence and/or its three-dimensional structure may be different and/or unrelated from an evolutionary standpoint. Thus, while Cas9 equivalents include any Cas9 ortholog, homolog, mutant, or variant described or embraced herein that are evolutionarily related, the Cas9 equivalents also embrace proteins that may have evolved through convergent evolution processes to have the same or similar function as Cas9, but which do not necessarily have any similarity with regard to amino acid sequence and/or three dimensional structure. The base editors described here embrace any Cas9 equivalent that would provide the same or similar function as Cas9 despite that the Cas9 equivalent may be based on a protein that arose through convergent evolution. For instance, if Cas9 refers to a type II enzyme of the CRISPR-Cas system, a Cas9 equivalent can refer to a type V or type VI enzyme of the CRISPR-Cas system.

[0168] For example, Cas12e (CasX) is a Cas9 equivalent that reportedly has the same function as Cas9 but which evolved through convergent evolution. Thus, the Cas12e (CasX) protein described in Liu et al., “CasX enzymes comprises a distinct family of RNA-guided genome editors,” Nature, 2019, Vol. 566: 218-223, is contemplated to be used with the base editors described herein. In addition, any variant or modification of Cas12e (CasX) is conceivable and within the scope of the present disclosure.

[0169] Cas9 is a bacterial enzyme that evolved in a wide variety of species. However, the Cas9 equivalents contemplated herein may also be obtained from archaea, which constitute a domain and kingdom of single-celled prokaryotic microbes different from bacteria.

[0170] In some embodiments, Cas9 equivalents may refer to Cas12e (CasX) or Cas12d (CasY), which have been described in, for example, Burstein et al., “New CRISPR-Cas systems from uncultivated microbes.” Cell Res. 2017 Feb. 21. doi: 10.1038/cr.2017.21, the entire contents of which is hereby incorporated by reference. Using genome-resolved metagenomics, a number of CRISPR-Cas systems were identified, including the first reported Cas9 in the archaeal domain of life. This divergent Cas9 protein was found in little-studied nanoarchaea as part of an active CRISPR-Cas system. In bacteria, two previously unknown systems were discovered, CRISPR-Cas12e and CRISPR-Cas12d, which are among the most compact systems yet discovered. In some embodiments, Cas9 refers to Cas12e, or a variant of Cas12e. In some embodiments, Cas9 refers to a Cas12d, or a variant of Cas12d. It should be appreciated that other RNA-guided DNA binding proteins may be used as a nucleic acid programmable DNA binding protein (napDNAbp), and are within the scope of this disclosure. Also see Liu et al., “CasX enzymes comprises a distinct family of RNA-guided genome editors,” Nature, 2019, Vol. 566: 218-223. Any of these Cas9 equivalents are contemplated.

[0171] In some embodiments, the Cas9 equivalent comprises an amino acid sequence that is at least 85%, at least 90%, at least 91%, at least 92%, at least 93%, at least 94%, at least 95%, at least 96%, at least 97%, at least 98%, at least 99%, or at least 99.5% identical to a naturally-occurring Cas12e (CasX) or Cas12d (CasY) protein. In some embodiments, the napDNAbp is a naturally-occurring CasX or CasY protein. In some embodiments, the napDNAbp comprises an amino acid sequence that is at least 85%, at least 90%, at least 91%, at least 92%, at least 93%, at least 94%, at least 95%, at least 96%, at least 97%, at least 98%, at least 99%, or at least 99.5% identical to a wild-type Cas moiety or any Cas moiety provided herein.

[0172] In various embodiments, the nucleic acid programmable DNA binding proteins include, without limitation, Cas9 (e.g., dCas9 and nCas9), Cas12e (CasX), Cas12d (CasY), Cas12a (Cpf1), Cas12b1 (C2c1), Cas13a (C2c2), Cas12c (C2c3), and Argonaute. One example of a nucleic acid programmable DNA-binding protein that has different PAM specificity than Cas9 is Clustered Regularly Interspaced Short Palindromic Repeats from Prevotella and Francisella 1 (i.e., Cas12a (Cpf1)). Similar to Cas9, Cas12a (Cpf1) is also a Class 2 CRISPR effector, but it is a member of the type V subgroup of enzymes, rather than the type II subgroup. It has been shown that Cas12a (Cpf1) mediates robust DNA interference with features distinct from Cas9. Cas12a (Cpf1) is a single RNA-guided endonuclease lacking tracrRNA, and it utilizes a T-rich protospacer-adjacent motif (TTN, TTTN, or YTN). Moreover, Cpf1 cleaves DNA via a staggered DNA double-stranded break. Out of 16 Cpf1-family proteins, two enzymes from Acidaminococcus and Lachnospiraceae are shown to have efficient genome-editing activity in human cells. Cpf1 proteins are known in the art and have been described previously, for example Yamano et al., “Crystal structure of Cpf1 in complex with guide RNA and target DNA.” Cell (165) 2016, p. 949-962; the entire contents of which is hereby incorporated by reference.

[0173] In still other embodiments, the Cas protein may include any CRISPR associated protein, including but not limited to, Cas12a, Cas12b1, Cas1, Cas1B, Cas2, Cas3, Cas4, Cas5, Cas6, Cas7, Cas8, Cas9 (also known as Csn1 and Csx12), Cas10, Csy1, Csy2, Csy3, Cse1, Cse2, Csc1, Csc2, Csa5, Csn2. Csm2, Csm3, Csm4, Csm5, Csm6, Cmr1, Cmr3, Cmr4, Cmr5, Cmr6, Csb1, Csb2, Csb3, Csx17, Csx14, Csx10, Csx16, CsaX, Csx3, Csx1, Csx15, Csf1, Csf2, Csf3, Csf4, homologs thereof, or modified versions thereof, and preferably comprising a nickase mutation (e.g., a mutation corresponding to the D10A mutation of the wild type Cas9 polypeptide of SEQ ID NO:74).

[0174] In various other embodiments, the napDNAbp can be any of the following proteins: a Cas9, a Cas12a (Cpf1), a Cas12e (CasX), a Cas12d (CasY), a Cas12b1 (C2c1), a Cas13a (C2c2), a Cas12c (C2c3), a GeoCas9, a CjCas9, a Cas12a, a Cas12b, a Cas12g, a Cas12h, a Cas12i, a Cas13b, a Cas13c, a Cas13d, a Cas14, a Csn2, an xCas9, an SpCas9-NG, a circularly permuted Cas9, or an Argonaute (Ago) domain, or a variant thereof.

[0175] Exemplary Cas9 equivalent protein sequences can include the following:

| Description | Sequence |
|---|---|
| AsCas12a | MTQFEGFTNLYQVSKTLRFELIPQGKTLKHIQEQGFIEEDKARNDHYKELKPIIDRIYKTYADQCLQLVQL |
| (previously | DWENLSAAIDSYRKEKTEETRNALIEEQATYRNAIHDYFIGRTDNLTDAINKRHAEIYKGLFKAELFNGKV |
| known as | LKQLGTVTTTEHENALLRSFDKFTTYFSGFYENRKNVFSAEDISTAIPHRIVQDNFPKFKENCHIFTRLIT |
| Cpf1) | AVPSLREHFENVKKAIGIFVSTSIEEVFSFPFYNQLLTQTQIDLYNQLLGGISREAGTEKIKGLNEVLNLA |
| Acidaminococcus | IQKNDETAHIIASLPHRFIPLFKQILSDRNTLSFILEEFKSDEEVIQSFCKYKTLLRNENVLETAEALFNE |
| sp. | LNSIDLTHIFISHKKLETISSALCDHWDTLRNALYERRISELTGKITKSAKEKVQRSLKHEDINLQEIISA |
| (strain | AGKELSEAFKQKTSEILSHAHAALDQPLPTTLKKQEEKEILKSQLDSLLGLYHLLDWFAVDESNEVDPEFS |
| BV3L6) | ARLTGIKLEMEPSLSFYNKARNYATKKPYSVEKFKLNFQMPTLASGWDVNKEKNNGAILFVKNGLYYLGIM |
| UniProtKB | PKQKGRYKALSFEPTEKTSEGFDKMYYDYFPDAAKMIPKCSTQLKAVTAHFQTHTTPILLSNNFIEPLEIT |
| U2UMQ6 | KEIYDLNNPEKEPKKFQTAYAKKTGDQKGYREALCKWIDFTRDFLSKYTKTTSIDLSSLRPSSQYKDLGEY |
| | YAELNPLLYHISFQRIAEKEIMDAVETGKLYLFQIYNKDFAKGHHGKPNLHTLYWTGLFSPENLAKTSIKL |
| | NGQAELFYRPKSRMKRMAHRLGEKMLNKKLKDQKTPIPDTLYQELYDYVNHRLSHDLSDEARALLPNVITK |
| | EVSHEIIKDRRFTSDKFFFHVPITLNYQAANSPSKFNQRVNAYLKEHPETPIIGIDRGERNLIYITVIDST |
| | GKILEQRSLNTIQQFDYQKKLDNREKERVAARQAWSVVGTIKDLKQGYLSQVIHEIVDLMIHYQAVVVLEN |
| | LNFGFKSKRTGIAEKAVYQQFEKMLIDKLNCLVLKDYPAEKVGGVLNPYQLTDQFTSFAKMGTQSGFLFYV |
| | PAPYTSKIDPLTGFVDPFVWKTIKNHESRKHFLEGFDFLHYDVKTGDFILHFKMNRNLSFQRGLPGFMPAW |
| | DIVFEKNETQFDAKGTPFIAGKRIVPVIENHRFTGRYRDLYPANELIALLEEKGIVFRDGSNILPKLLEND |
| | DSHAIDTMVALIRSVLQMRNSNAATGEDYINSPVRDLNGVCFDSRFQNPEWPMDADANGAYHIALKGQLLL |
| | NHLKESKDLKLQNGISNQDWLAYIQELRN (SEQ ID NO: 120) |
| AsCas12a | MTQFEGFTNLYQVSKTLRFELIPQGKTLKHIQEQGFIEEDKARNDHYKELKPIIDRIYKTYADQCLQLVQL |
| nickase | DWENLSAAIDSYRKEKTEETRNALIEEQATYRNAIHDYFIGRTDNLTDAINKRHAEIYKGLFKAELFNGKV |
| (e.g., | LKQLGTVTTTEHENALLRSFDKFTTYFSGFYENRKNVFSAEDISTAIPHRIVQDNFPKFKENCHIFTRLIT |
| R1226A) | AVPSLREHFENVKKAIGIFVSTSIEEVFSFPFYNQLLTQTQIDLYNQLLGGISREAGTEKIKGLNEVLNLA |
| | IQKNDETAHIIASLPHRFIPLFKQILSDRNTLSFILEEFKSDEEVIQSFCKYKTLLRNENVLETAEALFNE |
| | LNSIDLTHIFISHKKLETISSALCDHWDTLRNALYERRISELTGKITKSAKEKVQRSLKHEDINLQEIISA |
| | AGKELSEAFKQKTSEILSHAHAALDQPLPTTLKKQEEKEILKSQLDSLLGLYHLLDWFAVDESNEVDPEFS |
| | ARLTGIKLEMEPSLSFYNKARNYATKKPYSVEKFKLNFQMPTLASGWDVNKEKNNGAILFVKNGLYYLGIM |
| | PKQKGRYKALSFEPTEKTSEGFDKMYYDYFPDAAKMIPKCSTQLKAVTAHFQTHTTPILLSNNFIEPLEIT |
| | KEIYDLNNPEKEPKKFQTAYAKKTGDQKGYREALCKWIDFTRDFLSKYTKTTSIDLSSLRPSSQYKDLGEY |
| | YAELNPLLYHISFQRIAEKEIMDAVETGKLYLFQIYNKDFAKGHHGKPNLHTLYWTGLFSPENLAKTSIKL |
| | NGQAELFYRPKSRMKRMAHRLGEKMLNKKLKDQKTPIPDTLYQELYDYVNHRLSHDLSDEARALLPNVITK |
| | EVSHEIIKDRRFTSDKFFFHVPITLNYQAANSPSKFNQRVNAYLKEHPETPIIGIDRGERNLIYITVIDST |
| | GKILEQRSLNTIQQFDYQKKLDNREKERVAARQAWSVVGTIKDLKQGYLSQVIHEIVDLMIHYQAVVVLEN |
| | LNFGFKSKRTGIAEKAVYQQFEKMLIDKLNCLVLKDYPAEKVGGVLNPYQLTDQFTSFAKMGTQSGFLFYV |
| | PAPYTSKIDPLTGFVDPFVWKTIKNHESRKHFLEGFDFLHYDVKTGDFILHFKMNRNLSFQRGLPGFMPAW |
| | DIVFEKNETQFDAKGTPFIAGKRIVPVIENHRFTGRYRDLYPANELIALLEEKGIVFRDGSNILPKLLEND |
| | DSHAIDTMVALIRSVLQMANSNAATGEDYINSPVRDLNGVCFDSRFQNPEWPMDADANGAYHIALKGQLLL |
| | NHLKESKDLKLQNGISNQDWLAYIQELRN (SEQ ID NO: 121) |
| LbCas12a | MNYKTGLEDFIGKESLSKTLRNALIPTESTKIHMEEMGVIRDDELRAEKQQELKEIMDDYYRTFIEEKLGQ |
| (previously | IQGIQWNSLFQKMEETMEDISVRKDLDKIQNEKRKEICCYFTSDKRFKDLFNAKLITDILPNFIKDNKEYT |
| known as | EEEKAEKEQTRVLFQRFATAFTNYFNQRRNNFSEDNISTAISFRIVNENSEIHLQNMRAFQRIEQQYPEEV |
| Cpf1) | CGMEEEYKDMLQEWQMKHIYSVDFYDRELTQPGIEYYNGICGKINEHMNQFCQKNRINKNDFRMKKLHKQI |
| Lachnospiraceae | LCKKSSYYEIPFRFESDQEVYDALNEFIKTMKKKEIIRRCVHLGQECDDYDLGKIYISSNKYEQISNALYG |
| bacterium | SWDTIRKCIKEEYMDALPGKGEKKEEKAEAAAKKEEYRSIADIDKIISLYGSEMDRTISAKKCITEICDMA |
| GAM79 | GQISIDPLVCNSDIKLLQNKEKTTEIKTILDSFLHVYQWGQTFIVSDIIEKDSYFYSELEDVLEDFEGITT |
| Ref Seq. | LYNHVRSYVTQKPYSTVKFKLHFGSPTLANGWSQSKEYDNNAILLMRDQKFYLGIFNVRNKPDKQIIKGHE |
| WP_119623382.1 | KEEKGDYKKMIYNLLPGPSKMLPKVFITSRSGQETYKPSKHILDGYNEKRHIKSSPKFDLGYCWDLIDYYK |
| | ECIHKHPDWKNYDFHFSDTKDYEDISGFYREVEMQGYQIKWTYISADEIQKLDEKGQIFLFQIYNKDFSVH |
| | STGKDNLHTMYLKNLFSEENLKDIVLKLNGEAELFFRKASIKTPIVHKKGSVLVNRSYTQTVGNKEIRVSI |
| | PEEYYTEIYNYLNHIGKGKLSSEAQRYLDEGKIKSFTATKDIVKNYRYCCDHYFLHLPITINFKAKSDVAV |
| | NERTLAYIAKKEDIHIIGIDRGERNLLYISVVDVHGNIREQRSFNIVNGYDYQQKLKDREKSRDAARKNWE |
| | EIEKIKELKEGYLSMVIHYIAQLVVKYNAVVAMEDLNYGFKTGRFKVERQVYQKFETMLIEKLHYLVFKDR |
| | EVCEEGGVLRGYQLTYIPESLKKVGKQCGFIFYVPAGYTSKIDPTTGFVNLFSFKNLTNRESRQDFVGKFD |
| | EIRYDRDKKMFEFSFDYNNYIKKGTILASTKWKVYTNGTRLKRIVVNGKYTSQSMEVELTDAMEKMLQRAG |
| | IEYHDGKDLKGQIVEKGIEAEIIDIFRLTVQMRNSRSESEDREYDRLISPVLNDKGEFFDTATADKTLPQD |
| | ADANGAYCIALKGLYEVKQIKENWKENEQFPRNKLVQDNKTWFDFMQKKRYL (SEQ ID NO: 122) |
| PcCas12a - | MAKNFEDFKRLYSLSKTLRFEAKPIGATLDNIVKSGLLDEDEHRAASYVKVKKLIDEYHKVFIDRVLDDGC |
| previously | LPLENKGNNNSLAEYYESYVSRAQDEDAKKKFKEIQQNLRSVIAKKLTEDKAYANLFGNKLIESYKDKEDK |
| known at | KKIIDSDLIQFINTAESTQLDSMSQDEAKELVKEFWGFVTYFYGFFDNRKNMYTAEEKSTGIAYRLVNENL |
| Cpf1 | PKFIDNIEAFNRAITRPEIQENMGVLYSDFSEYLNVESIQEMFQLDYYNMLLTQKQIDVYNAIIGGKTDDE |
| Prevotella | HDVKIKGINEYINLYNQQHKDDKLPKLKALFKQILSDRNAISWLPEEFNSDQEVLNAIKDCYERLAENVLG |
| copri | DKVLKSLLGSLADYSLDGIFIRNDLQLTDISQKMFGNWGVIQNAIMQNIKRVAPARKHKESEEDYEKRIAG |
| Ref Seq. | IFKKADSFSISYINDCLNEADPNNAYFVENYFATFGAVNTPTMQRENLFALVQNAYTEVAALLHSDYPTVK |
| WP_119227726.1 | HLAQDKANVSKIKALLDAIKSLQHFVKPLLGKGDESDKDERFYGELASLWAELDTVTPLYNMIRNYMTRKP |
| | YSQKKIKLNFENPQLLGGWDANKEKDYATIILRRNGLYYLAIMDKDSRKLLGKAMPSDGECYEKMVYKFFK |
| | DVTTMIPKCSTQLKDVQAYFKVNTDDYVLNSKAFNKPLTITKEVFDLNNVLYGKYKKFQKGYLTATGDNVG |
| | YTHAVNVWIKFCMDFLNSYDSTCIYDFSSLKPESYLSLDAFYQDANLLLYKLSFARASVSYINQLVEEGKM |
| | YLFQIYNKDFSEYSKGTPNMHTLYWKALFDERNLADVVYKLNGQAEMFYRKKSIENTHPTHPANHPILNKN |
| | KDNKKKESLFDYDLIKDRRYTVDKFMFHVPITMNFKSVGSENINQDVKAYLRHADDMHIIGIDRGERHLLY |
| | LVVIDLQGNIKEQYSLNEIVNEYNGNTYHTNYHDLLDVREEERLKARQSWQTIENIKELKEGYLSQVIHKI |
| | TQLMVRYHAIVVLEDLSKGFMRSRQKVEKQVYQKFEKMLIDKLNYLVDKKTDVSTPGGLLNAYQLTCKSDS |
| | SQKLGKQSGFLFYIPAWNTSKIDPVTGFVNLLDTHSLNSKEKIKAFFSKFDAIRYNKDKKWFEFNLDYDKF |
| | GKKAEDTRTKWTLCTRGMRIDTFRNKEKNSQWDNQEVDLTTEMKSLLEHYYIDIHGNLKDAISAQTDKAFF |
| | TGLLHILKLTLQMRNSITGTETDYLVSPVADENGIFYDSRSCGNQLPENADANGAYNIARKGLMLIEQIKN |
| | AEDLNNVKFDISNKAWLNFAQQKPYKNG (SEQ ID NO: 123) |
| ErCas12a - | MFSAKLISDILPEFVIHNNNYSASEKEEKTQVIKLFSRFATSFKDYFKNRANCFSANDISSSSCHRIVNDN |
| previously | AEIFFSNALVYRRIVKNLSNDDINKISGDMKDSLKEMSLEEIYSYEKYGEFITQEGISFYNDICGKVNLFM |
| known at | NLYCQKNKENKNLYKLRKLHKQILCIADTSYEVPYKFESDEEVYQSVNGFLDNISSKHIVERLRKIGENYN |
| Cpf1 | GYNLDKIYIVSKFYESVSQKTYRDWETINTALEIHYNNILPGNGKSKADKVKKAVKNDLQKSITEINELVS |
| Eubacterium | NYKLCPDDNIKAETYIHEISHILNNFEAQELKYNPEIHLVESELKASELKNVLDVIMNAFHWCSVFMTEEL |
| rectale | VDKDNNFYAELEEIYDEIYPVISLYNLVRNYVTQKPYSTKKIKLNFGIPTLADGWSKSKEYSNNAIILMRD |
| Ref Seq. | NLYYLGIFNAKNKPDKKIIEGNTSENKGDYKKMIYNLLPGPNKMIPKVFLSSKTGVETYKPSAYILEGYKQ |
| WP_119223642.1 | NKHLKSSKDFDITFCHDLIDYFKNCIAIHPEWKNFGFDFSDTSTYEDISGFYREVELQGYKIDWTYISEKD |
| | IDLLQEKGQLYLFQIYNKDFSKKSSGNDNLHTMYLKNLFSEENLKDIVLKLNGEAEIFFRKSSIKNPIIHK |
| | KGSILVNRTYEAEEKDQFGNIQIVRKTIPENIYQELYKYFNDKSDKELSDEAAKLKNVVGHHEAATNIVKD |
| | YRYTYDKYFLHMPITINFKANKTSFINDRILQYIAKEKDLHVIGIDRGERNLIYVSVIDTCGNIVEQKSFN |
| | IVNGYDYQIKLKQQEGARQIARKEWKEIGKIKEIKEGYLSLVIHEISKMVIKYNAIIAMEDLSYGFKKGRF |
| | KVERQVYQKFETMLINKLNYLVFKDISITENGGLLKGYQLTYIPDKLKNVGHQCGCIFYVPAAYTSKIDPT |
| | TGFVNIFKFKDLTVDAKREFIKKFDSIRYDSDKNLFCFTFDYNNFITQNTVMSKSSWSVYTYGVRIKRRFV |
| | NGRFSNESDTIDITKDMEKTLEMTDINWRDGHDLRQDIIDYEIVQHIFEIFKLTVQMRNSLSELEDRDYDR |
| | LISPVLNENNIFYDSAKAGDALPKDADANGAYCIALKGLYEIKQITENWKEDGKFSRDKLKISNKDWFDFI |
| | QNKRYL (SEQ ID NO: 124) |
| CsCas12a - | MNYKTGLEDFIGKESLSKTLRNALIPTESTKIHMEEMGVIRDDELRAEKQQELKEIMDDYYRAFIEEKLGQ |
| previously | IQGIQWNSLFQKMEETMEDISVRKDLDKIQNEKRKEICCYFTSDKRFKDLFNAKLITDILPNFIKDNKEYT |
| known at | EEEKAEKEQTRVLFQRFATAFTNYFNQRRNNFSEDNISTAISFRIVNENSEIHLQNMRAFQRIEQQYPEEV |
| Cpf1 | CGMEEEYKDMLQEWQMKHIYLVDFYDRVLTQPGIEYYNGICGKINEHMNQFCQKNRINKNDFRMKKLHKQI |
| Clostridium | LCKKSSYYEIPFRFESDQEVYDALNEFIKTMKEKEIICRCVHLGQKCDDYDLGKIYISSNKYEQISNALYG |
| sp. AF34- | SWDTIRKCIKEEYMDALPGKGEKKEEKAEAAAKKEEYRSIADIDKIISLYGSEMDRTISAKKCITEICDMA |
| 10BH | GQISTDPLVCNSDIKLLQNKEKTTEIKTILDSFLHVYQWGQTFIVSDIIEKDSYFYSELEDVLEDFEGITT |
| Ref Seq. | LYNHVRSYVTQKPYSTVKFKLHFGSPTLANGWSQSKEYDNNAILLMRDQKFYLGIFNVRNKPDKQIIKGHE |
| WP_118538418.1 | KEEKGDYKKMIYNLLPGPSKMLPKVFITSRSGQETYKPSKHILDGYNEKRHIKSSPKFDLGYCWDLIDYYK |
| | ECIHKHPDWKNYDFHFSDTKDYEDISGFYREVEMQGYQIKWTYISADEIQKLDEKGQIFLFQIYNKDFSVH |
| | STGKDNLHTMYLKNLFSEENLKDIVLKLNGEAELFFRKASIKTPVVHKKGSVLVNRSYTQTVGDKEIRVSI |
| | PEEYYTEIYNYLNHIGRGKLSTEAQRYLEERKIKSFTATKDIVKNYRYCCDHYFLHLPITINFKAKSDIAV |
| | NERTLAYIAKKEDIHIIGIDRGERNLLYISVVDVHGNIREQRSFNIVNGYDYQQKLKDREKSRDAARKNWE |
| | EIEKIKELKEGYLSMVIHYIAQLVVKYNAVVAMEDLNYGFKTGRFKVERQVYQKFETMLIEKLHYLVFKDR |
| | EVCEEGGVLRGYQLTYIPESLKKVGKQCGFIFYVPAGYTSKIDPTTGFVNLFSFKNLTNRESRQDFVGKFD |
| | EIRYDRDKKMFEFSFDYNNYIKKGTMLASTKWKVYTNGTRLKRIVVNGKYTSQSMEVELTDAMEKMLQRAG |
| | IEYHDGKDLKGQIVEKGIEAEIIDIFRLTVQMRNSRSESEDREYDRLISPVLNDKGEFFDTATADKTLPQD |
| | ADANGAYCIALKGLYEVKQIKENWKENEQFPRNKLVQDNKTWFDFMQKKRYL (SEQ ID NO: 125) |
| BhCas12b | MATRSFILKIEPNEEVKKGLWKTHEVLNHGIAYYMNILKLIRQEAIYEHHEQDPKNPKKVSKAEIQAELWD |
| Bacillus | FVLKMQKCNSFTHEVDKDEVFNILRELYEELVPSSVEKKGEANQLSNKFLYPLVDPNSQSGKGTASSGRKP |
| hisashii | RWYNLKIAGDPSWEEEKKKWEEDKKKDPLAKILGKLAEYGLIPLFIPYTDSNEPIVKEIKWMEKSRNQSVR |
| Ref Seq. | RLDKDMFIQALERFLSWESWNLKVKEEYEKVEKEYKTLEERIKEDIQALKALEQYEKERQEQLLRDTLNTN |
| WP_095142515.1 | EYRLSKRGLRGWREIIQKWLKMDENEPSEKYLEVFKDYQRKHPREAGDYSVYEFLSKKENHFIWRNHPEYP |
| | YLYATFCEIDKKKKDAKQQATFTLADPINHPLWVRFEERSGSNLNKYRILTEQLHTEKLKKKLTVQLDRLI |
| | YPTESGGWEEKGKVDIVLLPSRQFYNQIFLDIEEKGKHAFTYKDESIKFPLKGTLGGARVQFDRDHLRRYP |
| | HKVESGNVGRIYFNMTVNIEPTESPVSKSLKIHRDDFPKVVNFKPKELTEWIKDSKGKKLKSGIESLEIGL |
| | RVMSIDLGQRQAAAASIFEVVDQKPDIEGKLFFPIKGTELYAVHRASFNIKLPGETLVKSREVLRKAREDN |
| | LKLMNQKLNFLRNVLHFQQFEDITEREKRVTKWISRQENSDVPLVYQDELIQIRELMYKPYKDWVAFLKQL |
| | HKRLEVEIGKEVKHWRKSLSDGRKGLYGISLKNIDEIDRTRKFLLRWSLRPTEPGEVRRLEPGQRFAIDQL |
| | NHLNALKEDRLKKMANTIIMHALGYCYDVRKKKWQAKNPACQIILFEDLSNYNPYEERSRFENSKLMKWSR |
| | REIPRQVALQGEIYGLQVGEVGAQFSSRFHAKTGSPGIRCSVVTKEKLQDNRFFKNLQREGRLTLDKIAVL |
| | KEGDLYPDKGGEKFISLSKDRKCVTTHADINAAQNLQKRFWTRTHGFYKVYCKAYQVDGQTVYIPESKDQK |
| | QKIIEEFGEGYFILKDGVYEWVNAGKLKIKKGSSKQSSSELVDSDILKDSFDLASELKGEKLMLYRDPSGN |
| | VFPSDKWMAAGVFFGKLERILISKLTNQYSISTIEDDSSKQSM (SEQ ID NO: 126) |
| ThCas12b | MSEKTTQRAYTLRLNRASGECAVCQNNSCDCWHDALWATHKAVNRGAKAFGDWLLTLRGGLCHTLVEMEVP |
| Thermomonas | AKGNNPPQRPTDQERRDRRVLLALSWLSVEDEHGAPKEFIVATGRDSADDRAKKVEEKLREILEKRDFQEH |
| hydrothermalis | EIDAWLQDCGPSLKAHIREDAVWVNRRALFDAAVERIKTLTWEEAWDFLEPFFGTQYFAGIGDGKDKDDAE |
| Ref Seq. | GPARQGEKAKDLVQKAGQWLSARFGIGTGADFMSMAEAYEKIAKWASQAQNGDNGKATIEKLACALRPSEP |
| WP_072754838 | PTLDTVLKCISGPGHKSATREYLKTLDKKSTVTQEDLNQLRKLADEDARNCRKKVGKKGKKPWADEVLKDV |
| | ENSCELTYLQDNSPARHREFSVMLDHAARRVSMAHSWIKKAEQRRRQFESDAQKLKNLQERAPSAVEWLDR |
| | FCESRSMTTGANTGSGYRIRKRAIEGWSYVVQAWAEASCDTEDKRIAAARKVQADPEIEKFGDIQLFEALA |
| | ADEAICVWRDQEGTQNPSILIDYVTGKTAEHNQKRFKVPAYRHPDELRHPVFCDFGNSRWSIQFAIHKEIR |
| | DRDKGAKQDTRQLQNRHGLKMRLWNGRSMTDVNLHWSSKRLTADLALDQNPNPNPTEVTRADRLGRAASSA |
| | FDHVKIKNVFNEKEWNGRLQAPRAELDRIAKLEEQGKTEQAEKLRKRLRWYVSFSPCLSPSGPFIVYAGQH |
| | NIQPKRSGQYAPHAQANKGRARLAQLILSRLPDLRILSVDLGHRFAAACAVWETLSSDAFRREIQGLNVLA |
| | GGSGEGDLFLHVEMTGDDGKRRTVVYRRIGPDQLLDNTPHPAPWARLDRQFLIKLQGEDEGVREASNEELW |
| | TVHKLEVEVGRTVPLIDRMVRSGFGKTEKQKERLKKLRELGWISAMPNEPSAETDEKEGEIRSISRSVDEL |
| | MSSALGTLRLALKRHGNRARIAFAMTADYKPMPGGQKYYFHEAKEASKNDDETKRRDNQIEFLQDALSLWH |
| | DLFSSPDWEDNEAKKLWQNHIATLPNYQTPEEISAELKRVERNKKRKENRDKLRTAAKALAENDQLRQHLH |
| | DTWKERWESDDQQWKERLRSLKDWIFPRGKAEDNPSIRHVGGLSITRINTISGLYQILKAFKMRPEPDDLR |
| | KNIPQKGDDELENFNRRLLEARDRLREQRVKQLASRIIEAALGVGRIKIPKNGKLPKRPRTTVDTPCHAVV |
| | IESLKTYRPDDLRTRRENRQLMQWSSAKVRKYLKEGCELYGLHFLEVPANYTSRQCSRTGLPGIRCDDVPT |
| | GDFLKAPWWRRAINTAREKNGGDAKDRFLVDLYDHLNNLQSKGEALPATVRVPRQGGNLFIAGAQLDDTNK |
| | ERRAIQADLNAAANIGLRALLDPDWRGRWWYVPCKDGTSEPALDRIEGSTAFNDVRSLPTGDNSSRRAPRE |
| | IENLWRDPSGDSLESGTWSPTRAYWDTVQSRVIELLRRHAGLPTS (SEQ ID NO: 127) |
| LsCas12b | MSIRSFKLKLKTKSGVNAEQLRRGLWRTHQLINDGIAYYMNWLVLLRQEDLFIRNKETNEIEKRSKEEIQA |
| Laceyella | VLLERVHKQQQRNQWSGEVDEQTLLQALRQLYEEIVPSVIGKSGNASLKARFFLGPLVDPNNKTTKDVSKS |
| sacchari | GPTPKWKKMKDAGDPNWVQEYEKYMAERQTLVRLEEMGLIPLFPMYTDEVGDIHWLPQASGYTRTWDRDMF |
| WP_132221894.1 | QQAIERLLSWESWNRRVRERRAQFEKKTHDFASRFSESDVQWMNKLREYEAQQEKSLEENAFAPNEPYALT |
| | KKALRGWERVYHSWMRLDSAASEEAYWQEVATCQTAMRGEFGDPAIYQFLAQKENHDIWRGYPERVIDFAE |
| | LNHLQRELRRAKEDATFTLPDSVDHPLWVRYEAPGGTNIHGYDLVQDTKRNLTLILDKFILPDENGSWHEV |
| | KKVPFSLAKSKQFHRQVWLQEEQKQKKREVVFYDYSTNLPHLGTLAGAKLQWDRNFLNKRTQQQIEETGEI |
| | GKVFFNISVDVRPAVEVKNGRLQNGLGKALTVLTHPDGTKIVTGWKAEQLEKWVGESGRVSSLGLDSLSEG |
| | LRVMSIDLGQRTSATVSVFEITKEAPDNPYKFFYQLEGTEMFAVHQRSFLLALPGENPPQKIKQMREIRWK |
| | ERNRIKQQVDQLSAILRLHKKVNEDERIQAIDKLLQKVASWQLNEEIATAWNQALSQLYSKAKENDLQWNQ |
| | AIKNAHHQLEPNNGKQISLWRKDLSTGRQGIAGLSLWSIEELEATKKLLTRWSKRSREPGVVKRIERFETF |
| | AKQIQHHINQVKENRLKQLANLIVMTALGYKYDQEQKKWIEVYPACQVVLFENLRSYRFSFERSRRENKKL |
| | MEWSHRSIPKLVQMQGELFGLQVADVYAAYSSRYHGRTGAPGIRCHALTEADLRNETNIIHELIEAGFIKE |
| | EHRPYLQQGDLVPWSGGELFATLQKPYDNPRILTLHADINAAQNIQKRFWHPSMWFRVNCESVMEGEIVTY |
| | VPKNKTVHKKQGKTFRFVKVEGSDVYEWAKWSKNRNKNTFSSITERKPPSSMILFRDPSGTFFKEQEWVEQ |
| | KTFWGKVQSMIQAYMKKTIVQRMEE (SEQ ID NO: 128) |
| DtCas12b | MVLGRKDDTAELRRALWTTHEHVNLAVAEVERVLLRCRGRSYWTLDRRGDPVHVPESQVAEDALAMAREAQ |
| Dsulfonatronum | RRNGWPVVGEDEEILLALRYLYEQIVPSCLLDDLGKPLKGDAQKIGTNYAGPLFDSDTCRRDEGKDVACCG |
| thiodismutans | PFHEVAGKYLGALPEWATPISKQEFDGKDASHLRFKATGGDDAFFRVSIEKANAWYEDPANQDALKNKAYN |
| WP_031386437 | KDDWKKEKDKGISSWAVKYIQKQLQLGQDPRTEVRRKLWLELGLLPLFIPVFDKTMVGNLWNRLAVRLALA |
| | HLLSWESWNHRAVQDQALARAKRDELAALFLGMEDGFAGLREYELRRNESIKQHAFEPVDRPYVVSGRALR |
| | SWTRVREEWLRHGDTQESRKNICNRLQDRLRGKFGDPDVFHWLAEDGQEALWKERDCVTSFSLLNDADGLL |
| | EKRKGYALMTFADARLHPRWAMYEAPGGSNLRTYQIRKTENGLWADVVLLSPRNESAAVEEKTFNVRLAPS |
| | GQLSNVSFDQIQKGSKMVGRCRYQSANQQFEGLLGGAEILFDRKRIANEQHGATDLASKPGHVWFKLTLDV |
| | RPQAPQGWLDGKGRPALPPEAKHFKTALSNKSKFADQVRPGLRVLSVDLGVRSFAACSVFELVRGGPDQGT |
| | YFPAADGRTVDDPEKLWAKHERSFKITLPGENPSRKEEIARRAAMEELRSLNGDIRRLKAILRLSVLQEDD |
| | PRTEHLRLFMEAIVDDPAKSALNAELFKGFGDDRFRSTPDLWKQHCHFFHDKAEKVVAERFSRWRTETRPK |
| | SSSWQDWRERRGYAGGKSYWAVTYLEAVRGLILRWNMRGRTYGEVNRQDKKQFGTVASALLHHINQLKEDR |
| | IKTGADMIIQAARGFVPRKNGAGWVQVHEPCRLILFEDLARYRFRTDRSRRENSRLMRWSHREIVNEVGMQ |
| | GELYGLHVDTTEAGFSSRYLASSGAPGVRCRHLVEEDFHDGLPGMHLVGELDWLLPKDKDRTANEARRLLG |
| | GMVRPGMLVPWDGGELFATLNAASQLHVIHADINAAQNLQRRFWGRCGEAIRIVCNQLSVDGSTRYEMAKA |
| | PKARLLGALQQLKNGDAPFHLTSIPNSQKPENSYVMTPTNAGKKYRAGPGEKSSGEEDELALDIVEQAEEL |
| | AQGRKTFFRDPSGVFFAPDRWLPSEIYWSRIRRRIWQVTLERNSSGRQERAEMDEMPY (SEQ ID |
| | NO: 129) |

[0176] The base editors described herein may also comprise Cas12a (Cpf1) (dCpf1) variants that may be used as a guide nucleotide sequence-programmable DNA-binding protein domain. The Cas12a (Cpf1) protein has a RuvC-like endonuclease domain that is similar to the RuvC domain of Cas9 but does not have a HNH endonuclease domain, and the N-terminal of Cas12a (Cpf1) does not have the alfa-helical recognition lobe of Cas9. It was shown in Zetsche et al., Cell, 163, 759-771, 2015 (which is incorporated herein by reference) that, the RuvC-like domain of Cas12a (Cpf1) is responsible for cleaving both DNA strands and inactivation of the RuvC-like domain inactivates Cas12a (Cpf1) nuclease activity.

[0177] (viii) Cas9 Equivalents with Expanded PAM Sequence

[0178] In some embodiments, the napDNAbp is a nucleic acid programmable DNA binding protein that does not require a canonical (NGG) PAM sequence. In some embodiments, the napDNAbp is an argonaute protein. One example of such a nucleic acid programmable DNA binding protein is an Argonaute protein from Natronobacterium gregoryi (NgAgo). NgAgo is a ssDNA-guided endonuclease. NgAgo binds 5′ phosphorylated ssDNA of ˜24 nucleotides (gDNA) to guide it to its target site and will make DNA double-strand breaks at the gDNA site. In contrast to Cas9, the NgAgo-gDNA system does not require a protospacer-adjacent motif (PAM). Using a nuclease inactive NgAgo (dNgAgo) can greatly expand the bases that may be targeted. The characterization and use of NgAgo have been described in Gao et al., Nat Biotechnol., 2016 July; 34(7):768-73. PubMed PMID: 27136078; Swarts et al., Nature. 507(7491) (2014):258-61; and Swarts et al., Nucleic Acids Res. 43(10) (2015):5120-9, each of which is incorporated herein by reference.

[0179] In some embodiments, the napDNAbp is a prokaryotic homolog of an Argonaute protein. Prokaryotic homologs of Argonaute proteins are known and have been described, for example, in Makarova K., et al., “Prokaryotic homologs of Argonaute proteins are predicted to function as key components of a novel system of defense against mobile genetic elements”, Biol Direct. 2009 Aug. 25; 4:29. doi: 10.1186/1745-6150-4-29, the entire contents of which is hereby incorporated by reference. In some embodiments, the napDNAbp is a Marinitoga piezophila Argonaute (MpAgo) protein. The CRISPR-associated Marinitoga piezophila Argunaute (MpAgo) protein cleaves single-stranded target sequences using 5′-phosphorylated guides. The 5′ guides are used by all known Argonautes. The crystal structure of an MpAgo-RNA complex shows a guide strand binding site comprising residues that block 5′ phosphate interactions. This data suggests the evolution of an Argonaute subclass with noncanonical specificity for a 5′-hydroxylated guide. See, e.g., Kaya et al., “A bacterial Argonaute with noncanonical guide RNA specificity”, Proc Natl Acad Sci USA. 2016 Apr. 12; 113(15):4057-62, the entire contents of which are hereby incorporated by reference). It should be appreciated that other argonaute proteins may be used, and are within the scope of this disclosure.

[0180] In some embodiments, the napDNAbp is a single effector of a microbial CRISPR-Cas system. Single effectors of microbial CRISPR-Cas systems include, without limitation, Cas9, Cas12a (Cpf1), Cas12b1 (C2c1), Cas13a (C2c2), and Cas12c (C2c3). Typically, microbial CRISPR-Cas systems are divided into Class 1 and Class 2 systems. Class 1 systems have multi-subunit effector complexes, while Class 2 systems have a single protein effector. For example, Cas9 and Cas12a (Cpf1) are Class 2 effectors. In addition to Cas9 and Cas12a (Cpf1), three distinct Class 2 CRISPR-Cas systems (Cas12b1, Cas13a, and Cas12c) have been described by Shmakov et al., “Discovery and Functional Characterization of Diverse Class 2 CRISPR Cas Systems”, Mol. Cell, 2015 Nov. 5; 60(3): 385-397, the entire contents of which is hereby incorporated by reference. Effectors of two of the systems, Cas12b1 and Cas12c, contain RuvC-like endonuclease domains related to Cas12a. A third system, Cas13a contains an effector with two predicted HEPN RNase domains. Production of mature CRISPR RNA is tracrRNA-independent, unlike production of CRISPR RNA by Cas12b1. Cas12b1 depends on both CRISPR RNA and tracrRNA for DNA cleavage. Bacterial Cas13a has been shown to possess a unique RNase activity for CRISPR RNA maturation distinct from its RNA-activated single-stranded RNA degradation activity. These RNase functions are different from each other and from the CRISPR RNA-processing behavior of Cas12a. See, e.g., East-Seletsky, et al., “Two distinct RNase activities of CRISPR-C2c2 enable guide-RNA processing and RNA detection”, Nature, 2016 Oct. 13; 538(7624):270-273, the entire contents of which are hereby incorporated by reference. In vitro biochemical analysis of Cas13a in Leptotrichia shahii has shown that Cas13a is guided by a single CRISPR RNA and can be programed to cleave ssRNA targets carrying complementary protospacers. Catalytic residues in the two conserved HEPN domains mediate cleavage. Mutations in the catalytic residues generate catalytically inactive RNA-binding proteins. See e.g., Abudayyeh et al., “C2c2 is a single-component programmable RNA-guided RNA-targeting CRISPR effector”, Science, 2016 Aug. 5; 353(6299), the entire contents of which are hereby incorporated by reference.

[0181] The crystal structure of Alicyclobaccillus acidoterrastris Cas12b1 (AacC2c1) has been reported in complex with a chimeric single-molecule guide RNA (sgRNA). See e.g., Liu et al., “C2c1-sgRNA Complex Structure Reveals RNA-Guided DNA Cleavage Mechanism”, Mol. Cell, 2017 Jan. 19; 65(2):310-322, the entire contents of which are hereby incorporated by reference. The crystal structure has also been reported in Alicyclobacillus acidoterrestris C2c1 bound to target DNAs as ternary complexes. See e.g., Yang et al., “PAM-dependent Target DNA Recognition and Cleavage by C2C1 CRISPR-Cas endonuclease”, Cell, 2016 Dec. 15; 167(7):1814-1828, the entire contents of which are hereby incorporated by reference. Catalytically competent conformations of AacC2c1, both with target and non-target DNA strands, have been captured independently positioned within a single RuvC catalytic pocket, with C2c1-mediated cleavage resulting in a staggered seven-nucleotide break of target DNA. Structural comparisons between Cas12b1 ternary complexes and previously identified Cas9 and Cas12a counterparts demonstrate the diversity of mechanisms used by CRISPR-Cas9 systems.

[0182] In some embodiments, the napDNAbp may be a Cas12b, a Cas13a, or a Cas12c protein. In some embodiments, the napDNAbp is a Cas12b1 protein. In some embodiments, the napDNAbp is a Cas13a protein. In some embodiments, the napDNAbp is a Cas12c protein. In some embodiments, the napDNAbp comprises an amino acid sequence that is at least 85%, at least 90%, at least 91%, at least 92%, at least 93%, at least 94%, at least 95%, at least 96%, at least 97%, at least 98%, at least 99%, or at least 99.5% identical to a naturally-occurring Cas12b1 (C2c1), Cas13a (C2c2), or Cas12c (C2c3) protein. In some embodiments, the napDNAbp is a naturally-occurring C2c1, C2c2, or C2c3 protein.

[0183] Some aspects of the disclosure provide Cas9 domains that have different PAM specificities. Typically, Cas9 proteins, such as Cas9 from S. pyogenes (spCas9), require a canonical NGG PAM sequence to bind a particular nucleic acid region. This may limit the ability to edit desired bases within a genome. In some embodiments, the base editing fusion proteins provided herein may need to be placed at a precise location, for example where a target base is placed within a 4 base region (e.g., a “editing window”), which is approximately 15 bases upstream of the PAM. See Komor, A. C., et al., “Programmable editing of a target base in genomic DNA without double-stranded DNA cleavage” Nature 533, 420-424 (2016), the entire contents of which are hereby incorporated by reference. Accordingly, in some embodiments, any of the fusion proteins provided herein may contain a Cas9 domain that is capable of binding a nucleotide sequence that does not contain a canonical (e.g., NGG) PAM sequence. Cas9 domains that bind to non-canonical PAM sequences have been described in the art and would be apparent to the skilled artisan. For example, Cas9 domains that bind non-canonical PAM sequences have been described in Kleinstiver, B. P., et al., “Engineered CRISPR-Cas9 nucleases with altered PAM specificities” Nature 523, 481-485 (2015); and Kleinstiver, B. P., et al., “Broadening the targeting range of Staphylococcus aureus CRISPR-Cas9 by modifying PAM recognition” Nature Biotechnology 33, 1293-1298 (2015); the entire contents of each are hereby incorporated by reference.

[0184] For example, a napDNAbp domain with altered PAM specificity, such as a domain with at least 80%, at least 85%, at least 90%, at least 95%, or at least 99% sequence identity with wild type Francisella novicida Cpf1 (SEQ ID NO: 130) (D917, E1006, and D1255), which has the following amino acid sequence:

(SEQ ID NO: 130)
MSIYQEFVNKYSLSKTLRFELIPQGKTLENIKARGLILDDEKRAKDYKKA
KQIIDKYHQFFIEEILSSVCISEDLLQNYSDVYFKLKKSDDDNLQKDFKS
AKDTIKKQISEYIKDSEKFKNLFNQNLIDAKKGQESDLILWLKQSKDNGI
ELFKANSDITDIDEALEIIKSFKGWTTYFKGFHENRKNVYSSNDIPTSII
YRIVDDNLPKFLENKAKYESLKDKAPEAINYEQIKKDLAEELTFDIDYKT
SEVNQRVFSLDEVFEIANFNNYLNQSGITKFNTIIGGKFVNGENTKRKGI
NEYINLYSQQINDKTLKKYKMSVLFKQILSDTESKSFVIDKLEDDSDVVT
TMQSFYEQIAAFKTVEEKSIKETLSLLFDDLKAQKLDLSKIYFKNDKSLT
DLSQQVFDDYSVIGTAVLEYITQQIAPKNLDNPSKKEQELIAKKTEKAKY
LSLETIKLALEEFNKHRDIDKQCRFEEILANFAAIPMIFDEIAQNKDNLA
QISIKYQNQGKKDLLQASAEDDVKAIKDLLDQTNNLLHKLKIFHISQSED
KANILDKDEHFYLVFEECYFELANIVPLYNKIRNYITQKPYSDEKFKLNF
ENSTLANGWDKNKEPDNTAILFIKDDKYYLGVMNKKNNKIFDDKAIKENK
GEGYKKIVYKLLPGANKMLPKVFFSAKSIKFYNPSEDILRIRNHSTHTKN
GSPQKGYEKFEFNIEDCRKFIDFYKQSISKHPEWKDFGFRFSDTQRYNSI
DEFYREVENQGYKLTFENISESYIDSVVNQGKLYLFQIYNKDFSAYSKGR
PNLHTLYWKALFDERNLQDVVYKLNGEAELFYRKQSIPKKITHPAKEAIA
NKNKDNPKKESVFEYDLIKDKRFTEDKFFFHCPITINFKSSGANKFNDEI
NLLLKEKANDVHILSIDRGERHLAYYTLVDGKGNIIKQDTFNIIGNDRMK
TNYHDKLAAIEKDRDSARKDWKKINNIKEMKEGYLSQVVHEIAKLVIEYN
AIVVFEDLNFGFKRGRFKVEKQVYQKLEKMLIEKLNYLVFKDNEFDKTGG
VLRAYQLTAPFETFKKMGKQTGIIYYVPAGFTSKICPVTGFVNQLYPKYE
SVSKSQEFFSKFDKICYNLDKGYFEFSFDYKNFGDKAAKGKWTIASFGSR
LINFRNSDKNHNWDTREVYPTKELEKLLKDYSIEYGHGECIKAAICGESD
KKFFAKLTSVLNTILQMRNSKTGTELDYLISPVADVNGNFFDSRQAPKNM
PQDADANGAYHIGLKGLMLLGRIKNNQEGKKLNLVIKNEEYFEFVQNRNN

[0185] An additional napDNAbp domain with altered PAM specificity, such as a domain having at least 80%, at least 85%, at least 90%, at least 95%, or at least 99% sequence identity with wild type Geobacillus thermodenitrificans Cas9 (SEQ ID NO: 131), which has the following amino acid sequence:

(SEQ ID NO: 131)
MKYKIGLDIGITSIGWAVINLDIPRIEDLGVRIFDRAENPKTGESLALPR
RLARSARRRLRRRKHRLERIRRLFVREGILTKEELNKLFEKKHEIDVWQL
RVEALDRKLNNDELARILLHLAKRRGFRSNRKSERTNKENSTMLKHIEEN
QSILSSYRTVAEMVVKDPKFSLHKRNKEDNYTNTVARDDLEREIKLIFAK
QREYGNIVCTEAFEHEYISIWASQRPFASKDDIEKKVGFCTFEPKEKRAP
KATYTFQSFTVWEHINKLRLVSPGGIRALTDDERRLIYKQAFHKNKITFH
DVRTLLNLPDDTRFKGLLYDRNTTLKENEKVRFLELGAYHKIRKAIDSVY
GKGAAKSFRPIDFDTFGYALTMFKDDTDIRSYLRNEYEQNGKRMENLADK
VYDEELIEELLNLSFSKFGHLSLKALRNILPYMEQGEVYSTACERAGYTF
TGPKKKQKTVLLPNIPPIANPVVMRALTQARKVVNAIIKKYGSPVSIHIE
LARELSQSFDERRKMQKEQEGNRKKNETAIRQLVEYGLTLNPTGLDIVKF
KLWSEQNGKCAYSLQPIEIERLLEPGYTEVDHVIPYSRSLDDSYTNKVLV
LTKENREKGNRTPAEYLGLGSERWQQFETFVLTNKQFSKKKRDRLLRLHY
DENEENEFKNRNLNDTRYISRFLANFIREHLKFADSDDKQKVYTVNGRIT
AHLRSRWNFNKNREESNLHHAVDAAIVACTTPSDIARVTAFYQRREQNKE
LSKKTDPQFPQPWPHFADELQARLSKNPKESIKALNLGNYDNEKLESLQP
VFVSRMPKRSITGAAHQETLRRYIGIDERSGKIQTVVKKKLSEIQLDKTG
HFPMYGKESDPRTYEAIRQRLLEHNNDPKKAFQEPLYKPKKNGELGPIIR
TIKIIDTTNQVIPLNDGKTVAYNSNIVRVDVFEKDGKYYCVPIYTIDMMK
GILPNKAIEPNKPYSEWKEMTEDYTFRFSLYPNDLIRIEFPREKTIKTAV
GEEIKIKDLFAYYQTIDSSNGGLSLVSHDNNFSLRSIGSRTLKRFEKYQV
DVLGNIYKVRGEKRVGVASSSHSKAGETIRPL

[0186] In some embodiments, the nucleic acid programmable DNA binding protein (napDNAbp) is a nucleic acid programmable DNA binding protein that does not require a canonical (NGG) PAM sequence. In some embodiments, the napDNAbp is an argonaute protein. One example of such a nucleic acid programmable DNA binding protein is an Argonaute protein from Natronobacterium gregoryi (NgAgo). NgAgo is a ssDNA-guided endonuclease. NgAgo binds 5′ phosphorylated ssDNA of ˜24 nucleotides (gDNA) to guide it to its target site and will make DNA double-strand breaks at the gDNA site. In contrast to Cas9, the NgAgo-gDNA system does not require a protospacer-adjacent motif (PAM). Using a nuclease inactive NgAgo (dNgAgo) can greatly expand the bases that may be targeted. The characterization and use of NgAgo have been described in Gao et al., Nat Biotechnol., 34(7): 768-73 (2016), PubMed PMID: 27136078; Swarts et al., Nature, 507(7491): 258-61 (2014); and Swarts et al., Nucleic Acids Res. 43(10) (2015): 5120-9, each of which is incorporated herein by reference. The sequence of Natronobacterium gregoryi Argonaute is provided in SEQ ID NO: 132.

[0187] The disclosed fusion proteins may comprise a napDNAbp domain having at least 80%, at least 85%, at least 90%, at least 95%, or at least 99% sequence identity with wild type Natronobacterium gregoryi Argonaute (SEQ ID NO: 132), which has the following amino acid sequence:

(SEQ ID NO: 132)
MTVIDLDSTTTADELTSGHTYDISVTLTGVYDNTDEQHPRMSLAFEQDNG
ERRYITLWKNTTPKDVFTYDYATGSTYIFTNIDYEVKDGYENLTATYQTT
VENATAQEVGTTDEDETFAGGEPLDHHLDDALNETPDDAETESDSGHVMT
SFASRDQLPEWTLHTYTLTATDGAKTDTEYARRTLAYTVRQELYTDHDAA
PVATDGLMLLTPEPLGETPLDLDCGVRVEADETRTLDYTTAKDRLLAREL
VEEGLKRSLWDDYLVRGIDEVLSKEPVLTCDEFDLHERYDLSVEVGHSGR
AYLHINFRHRFVPKLTLADIDDDNIYPGLRVKTTYRPRRGHIVWGLRDEC
ATDSLNTLGNQSVVAYHRNNQTPINTDLLDAIEAADRRVVETRRQGHGDD
AVSFPQELLAVEPNTHQIKQFASDGFHQQARSKTRLSASRCSEKAQAFAE
RLDPVRLNGSTVEFSSEFFTGNNEQQLRLLYENGESVLTFRDGARGAHPD
ETFSKGIVNPPESFEVAVVLPEQQADTCKAQWDTMADLLNQAGAPPTRSE
TVQYDAFSSPESISLNVAGAIDPSEVDAAFVVLPPDQEGFADLASPTETY
DELKKALANMGIYSQMAYFDRFRDAKIFYTRNVALGLLAAAGGVAFTTEH
AMPGDADMFIGIDVSRSYPEDGASGQINIAATATAVYKDGTILGHSSTRP
QLGEKLQSTDVRDIMKNAILGYQQVTGESPTHIVIHRDGFMNEDLDPATE
FLNEQGVEYDIVEIRKQPQTRLLAVSDVQYDTPVKSIAAINQNEPRATVA
TFGAPEYLATRDGGGLPRPIQIERVAGETDIETLTRQVYLLSQSHIQVHN
STARLPITTAYADQASTHATKGYLVQTGAFESNVGFL

[0188] (ix) Cas9 Variants with Modified PAM Specificities

[0189] The base editors of the present disclosure may also comprise Cas9 variants with modified PAM specificities. For example, the base editors described herein may utilize any naturally occurring or engineered variant of SpCas9 having expanded and/or relaxed PAM specificities which are described in the literature, including in Nishimasu et al., “Engineered CRISPR-Cas9 nuclease with expanded targeting space,” Science, 2018, 361: 1259-1262; Chatterjee et al., “Robust Genome Editing of Single-Base PAM Targets with Engineered ScCas9 Variants,” BioRxiv, Apr. 26, 2019. Some aspects of this disclosure provide Cas9 proteins that exhibit activity on a target sequence that does not comprise the canonical PAM (5′-NGG-3′, where N is A, C, G, or T) at its 3′-end. In some embodiments, the Cas9 protein exhibits activity on a target sequence comprising a 5′-NGG-3′ PAM sequence at its 3′-end. In some embodiments, the Cas9 protein exhibits activity on a target sequence comprising a 5′-NNG-3′ PAM sequence at its 3′-end. In some embodiments, the Cas9 protein exhibits activity on a target sequence comprising a 5′-NNA-3′ PAM sequence at its 3′-end. In some embodiments, the Cas9 protein exhibits activity on a target sequence comprising a 5′-NNC-3′ PAM sequence at its 3′-end. In some embodiments, the Cas9 protein exhibits activity on a target sequence comprising a 5′-NNT-3′ PAM sequence at its 3′-end. In some embodiments, the Cas9 protein exhibits activity on a target sequence comprising a 5′-NGT-3′ PAM sequence at its 3′-end. In some embodiments, the Cas9 protein exhibits activity on a target sequence comprising a 5′-NGA-3′ PAM sequence at its 3′-end. In some embodiments, the Cas9 protein exhibits activity on a target sequence comprising a 5′-NGC-3′ PAM sequence at its 3′-end. In some embodiments, the Cas9 protein exhibits activity on a target sequence comprising a 5′-NAA-3′ PAM sequence at its 3′-end. In some embodiments, the Cas9 protein exhibits activity on a target sequence comprising a 5′-NAC-3′ PAM sequence at its 3′-end. In some embodiments, the Cas9 protein exhibits activity on a target sequence comprising a 5′-NAT-3′ PAM sequence at its 3′-end. In still other embodiments, the Cas9 protein exhibits activity on a target sequence comprising a 5′-NAG-3′ PAM sequence at its 3′-end.

[0190] It should be appreciated that any of the amino acid mutations described herein, (e.g., A262T) from a first amino acid residue (e.g., A) to a second amino acid residue (e.g., T) may also include mutations from the first amino acid residue to an amino acid residue that is similar to (e.g., conserved) the second amino acid residue. For example, mutation of an amino acid with a hydrophobic side chain (e.g., alanine, valine, isoleucine, leucine, methionine, phenylalanine, tyrosine, or tryptophan) may be a mutation to a second amino acid with a different hydrophobic side chain (e.g., alanine, valine, isoleucine, leucine, methionine, phenylalanine, tyrosine, or tryptophan). For example, a mutation of an alanine to a threonine (e.g., a A262T mutation) may also be a mutation from an alanine to an amino acid that is similar in size and chemical properties to a threonine, for example, serine. As another example, mutation of an amino acid with a positively charged side chain (e.g., arginine, histidine, or lysine) may be a mutation to a second amino acid with a different positively charged side chain (e.g., arginine, histidine, or lysine). As another example, mutation of an amino acid with a polar side chain (e.g., serine, threonine, asparagine, or glutamine) may be a mutation to a second amino acid with a different polar side chain (e.g., serine, threonine, asparagine, or glutamine). Additional similar amino acid pairs include, but are not limited to, the following: phenylalanine and tyrosine; asparagine and glutamine; methionine and cysteine; aspartic acid and glutamic acid; and arginine and lysine. The skilled artisan would recognize that such conservative amino acid substitutions will likely have minor effects on protein structure and are likely to be well tolerated without compromising function. In some embodiments, any amino of the amino acid mutations provided herein from one amino acid to a threonine may be an amino acid mutation to a serine. In some embodiments, any amino of the amino acid mutations provided herein from one amino acid to an arginine may be an amino acid mutation to a lysine. In some embodiments, any amino of the amino acid mutations provided herein from one amino acid to an isoleucine, may be an amino acid mutation to an alanine, valine, methionine, or leucine. In some embodiments, any amino of the amino acid mutations provided herein from one amino acid to a lysine may be an amino acid mutation to an arginine. In some embodiments, any amino of the amino acid mutations provided herein from one amino acid to an aspartic acid may be an amino acid mutation to a glutamic acid or asparagine. In some embodiments, any amino of the amino acid mutations provided herein from one amino acid to a valine may be an amino acid mutation to an alanine, isoleucine, methionine, or leucine. In some embodiments, any amino of the amino acid mutations provided herein from one amino acid to a glycine may be an amino acid mutation to an alanine. It should be appreciated, however, that additional conserved amino acid residues would be recognized by the skilled artisan and any of the amino acid mutations to other conserved amino acid residues are also within the scope of this disclosure.

[0191] In some embodiments, the Cas9 protein comprises a combination of mutations that exhibit activity on a target sequence comprising a 5′-NAA-3′ PAM sequence at its 3′-end. In some embodiments, the combinations of mutations are present in any one of the clones listed in Table 1. In some embodiments, the combinations of mutations are conservative mutations of the clones listed in Table 1. In some embodiments, the Cas9 protein comprises the combination of mutations of any one of the Cas9 clones listed in Table 1.

TABLE 1
NAA PAM Clones

Mutations from wild-type SpCas9 (e.g., SEQ ID NO:)
D177N, K218R, D614N, D1135N, P1137S, E1219V, A1320V, A1323D, R1333K
D177N, K218R, D614N, D1135N, E1219V, Q1221H, H1264Y, A1320V, R1333K
A10T, I322V, S409I, E427G, G715C D1135N, E1219V, Q1221H, H1264Y, A1320V, R1333K
A367T, K710E, R1114G, D1135N, P1137S, E1219V, Q1221H, H1264Y, A1320V, R1333K
A10T, I322V, S409I, E427G, R753G D861N, D1135N, K1188R, E1219V, Q1221H, H1264H,
A1320V, R1333K
A10T, I322V, S409I, E427G, R654L V743I, R753G, M1021T, D1135N, D1180G, K1211R,
E1219V, Q1221H, H1264Y, A1320V, R1333K
A10T, I322V, S409I, E427G, V743I R753G, E762G, D1135N, D1180G, K1211R, E1219V,
Q1221H, H1264Y, A1320V, R1333K
A10T, I322V, S409I, E427G, R753G D1135N, D1180G, K1211R, E1219V, Q1221H, H1264Y,
S1274R, A1320V, R1333K
A10T, I322V, S409I, E427G, A589S R753G, D1135N, E1219V, Q1221H, H1264H, A1320V,
R1333K
A10T, I322V, S409I, E427G, R753G, E757K, G865G, D1135N, E1219V, Q1221H, H1254Y,
A1320V, R1333K
A10T, I322V, S409I, E427G, R654L, R753G, E757K, D1135N, E1219V, Q1221H, H1264Y,
A1320V, R1333K
A10T, I322V, S409I, E427G, K599R, M631A, R654L, K673E, V743I, R753G, N758H, E762G,
D1135N, D1180G, E1219V, Q1221H, Q1256R, H1264Y, A1320V, A1323D, R1333K
A10T, I322V, S409I, E427G, R654L, K673E, V743I, R753G, E762G, N869S, N1054D R1114G,
D1135N, D1180G, E1219V, Q1221H, H1264Y, A1320V, A1323D, R1333K
A10T, I322V, S409I, E427G, R654L, L727I, V743I, R753G, E762G, R859S, N946D, F1134L,
D1135N, D1180G, E1219V, Q1221H, H1264Y, N1317T, A1320V, A1323D, R1333K
A10T, I322V, S409I, E427G, R654L, K673E, V743I, R753G, E762G, N803S, N869S, Y1016D,
G1077D, R1114G, F1134L, D1135N, D1180G, E1219V, Q1221H, H1264Y, V1290G, L1318S,
A1320V, A1323D, R1333K
A10T, I322V, S409I, E427G, R654L, K673E, V743I, R753G, E762G, N803S, N869S, Y1016D,
G1077D, R1114G, F1134L, D1135N, K1151E, D1180G, E1219V, Q1221H, H1264Y, V1290G,
L1318S, A1320V, R1333K
A10T, I322V, S409I, E427G, R654L, K673E, V743I, R753G, E762G, N803S, N869S, Y1016D,
G1077D, R1114G, F1134L, D1135N, D1180G, E1219V, Q1221H, H1264Y, V1290G, L1318S,
A1320V, A1323D, R1333K
A10T, I322V, S409I, E427G, R654L, K673E, F693L, V743I, R753G, E762G, N803S, N869S,
L921P, Y1016D, G1077D, F1080S, R1114G, D1135N, D1180G, E1219V, Q1221H, H1264Y,
L1318S, A1320V, A1323D, R1333K
A10T, I322V, S409I, E427G, E630K, R654L, K673E, V743I, R753G, E762G, Q768H, N803S,
N869S, Y1016D, G1077D, R1114G, F1134L, D1135N, D1180G, E1219V, Q1221H, H1264Y,
L1318S, A1320V, R1333K
A10T, I322V, S409I, E427G, R654L, K673E, F693L, V743I, R753G, E762G, Q768H, N803S,
N869S, Y1016D, G1077D, R1114G, F1134L, D1135N, D1180G, E1219V, Q1221H, G1223S,
H1264Y, L1318S, A1320V, R1333K
A10T, I322V, S409I, E427G, R654L, K673E, F693L, V743I, R753G, E762G, N803S, N869S,
L921P, Y1016D, G1077D, F1801S, R1114G, D1135N, D1180G, E1219V, Q1221H, H1264Y,
L1318S, A1320V, A1323D, R1333K
A10T, I322V, S409I, E427G, R654L, V743I, R753G, M1021T, D1135N, D1180G, K1211R,
E1219V, Q1221H, H1264Y, A1320V, R1333K
A10T, I322V, S409I, E427G, R654L, K673E, V743I, R753G, E762G, M673I, N803S, N869S,
G1077D, R1114G, D1135N, V1139A, D1180G, E1219V, Q1221H, A1320V, R1333K
A10T, I322V, S409I, E427G, R654L, K673E, V743I, R753G, E762G, N803S, N869S, R1114G,
D1135N, E1219V, Q1221H, A1320V, R1333K

[0192] In some embodiments, the Cas9 protein comprises an amino acid sequence that is at least 80% identical to the amino acid sequence of a Cas9 protein as provided by any one of the variants of Table 1. In some embodiments, the Cas9 protein comprises an amino acid sequence that is at least 85%, at least 90%, at least 92%, at least 95%, at least 96%, at least 97%, at least 98%, at least 99%, or at least 99.5% identical to the amino acid sequence of a Cas9 protein as provided by any one of the variants of Table 1.

[0193] In some embodiments, the Cas9 protein exhibits an increased activity on a target sequence that does not comprise the canonical PAM (5′-NGG-3′) at its 3′ end as compared to Streptococcus pyogenes Cas9 as provided by SEQ ID NO: 74. In some embodiments, the Cas9 protein exhibits an activity on a target sequence having a 3′ end that is not directly adjacent to the canonical PAM sequence (5′-NGG-3′) that is at least 5-fold increased as compared to the activity of Streptococcus pyogenes Cas9 as provided by SEQ ID NO: 74 on the same target sequence. In some embodiments, the Cas9 protein exhibits an activity on a target sequence that is not directly adjacent to the canonical PAM sequence (5′-NGG-3′) that is at least 10-fold, at least 50-fold, at least 100-fold, at least 500-fold, at least 1,000-fold, at least 5,000-fold, at least 10,000-fold, at least 50,000-fold, at least 100,000-fold, at least 500,000-fold, or at least 1,000,000-fold increased as compared to the activity of Streptococcus pyogenes as provided by SEQ ID NO: 74 on the same target sequence. In some embodiments, the 3′ end of the target sequence is directly adjacent to an AAA, GAA, CAA, or TAA sequence. In some embodiments, the Cas9 protein comprises a combination of mutations that exhibit activity on a target sequence comprising a 5′-NAC-3′ PAM sequence at its 3′-end. In some embodiments, the combinations of mutations are present in any one of the clones listed in Table 2. In some embodiments, the combinations of mutations are conservative mutations of the clones listed in Table 2. In some embodiments, the Cas9 protein comprises the combination of mutations of any one of the Cas9 clones listed in Table 2.

TABLE 2
NAC PAM Clones

MUTATIONS FROM WILD-TYPE SPCAS9 (E.G., SEQ ID NO: 74)
T472I, R753G, K890E, D1332N, R1335Q, T1337N
I1057S, D1135N, P1301S, R1335Q, T1337N
T472I, R753G, D1332N, R1335Q, T1337N
D1135N, E1219V, D1332N, R1335Q, T1337N
T472I, R753G, K890E, D1332N, R1335Q, T1337N
I1057S, D1135N, P1301S, R1335Q, T1337N
T472I, R753G, D1332N, R1335Q, T1337N
T472I, R753G, Q771H, D1332N, R1335Q, T1337N
E627K, T638P, K652T, R753G, N803S, K959N, R1114G, D1135N, E1219V, D1332N, R1335Q,
T1337N
E627K, T638P, K652T, R753G, N803S, K959N, R1114G, D1135N, K1156E, E1219V, D1332N,
R1335Q, T1337N
E627K, T638P, V647I, R753G, N803S, K959N, G1030R, I1055E R1114G, D1135N, E1219V,
D1332N, R1335Q, T1337N
E627K, E630G, T638P, V647A, G687R, N767D, N803S, K959N, R1114G, D1135N, E1219V,
D1332G, R1335Q, T1337N
E627K, T638P, R753G, N803S, K959N, R1114G, D1135N, E1219V, N1266H, D1332N, R1335Q,
T1337N
E627K, T638P, R753G, N803S, K959N, I1057T, R1114G, D1135N, E1219V, D1332N, R1335Q,
T1337N
E627K, T638P, R753G, N803S, K959N, R1114G, D1135N, E1219V, D1332N, R1335Q, T1337N
E627K, M631I, T638P, R753G, N803S, K959N, Y1036H, R1114G, D1135N, E1219V, D1251G,
D1332G, R1335Q, T1337N
E627K, T638P, R753G, N803S, V875I, K959N, Y1016C, R1114G, D1135N, E1219V, D1251G,
D1332G, R1335Q, T1337N, I1348V
K608R, E627K, T638P, V647I, R654L, R753G, N803S, T804A, K848N, V922A, K959N, R1114G,
D1135N, E1219V, D1332N, R1335Q, T1337N
K608R, E627K, T638P, V647I, R753G, N803S, V922A, K959N, K1014N, V1015A, R1114G,
D1135N, K1156N, E1219V, N1252D, D1332N, R1335Q, T1337N
K608R, E627K, R629G, T638P, V647I, A711T, R753G, K775R, K789E, N803S, K959N, V1015A,
Y1036H, R1114G, D1135N, E1219V, N1286H, D1332N, R1335Q, T1337N
K608R, E627K, T638P, V647I, T740A, R753G, N803S, K948E, K959N, Y1016S, R1114G,
D1135N, E1219V, N1286H, D1332N, R1335Q, T1337N
K608R, E627K, T638P, V647I, T740A, N803S, K948E, K959N, Y1016S, R1114G, D1135N,
E1219V, N1286H, D1332N, R1335Q, T1337N
I670S, K608R, E627K, E630G, T638P, V647I, R653K, R753G, I795L, K797N, N803S, K866R,
K890N, K959N, Y1016C, R1114G, D1135N, E1219V, D1332N, R1335Q, T1337N
K608R, E627K, T638P, V647I, T740A, G752R, R753G, K797N, N803S, K948E, K959N, V1015A,
Y1016S, R1114G, D1135N, E1219V, N1266H, D1332N, R1335Q, T1337N
I570T, A589V, K608R, E627K, T638P, V647I, R654L, Q716R, R753G, N803S, K948E, K959N,
Y1016S, R1114G, D1135N, E1207G, E1219V, N1234D, D1332N, R1335Q T1337N
K608R, E627K, R629G, T638P, V647I, R654L, Q740R, R753G, N803S, K959N, N990S, T995S,
V1015A, Y1036D, R1114G, D1135N, E1207G, E1219V, N1234D, N1266H, D1332N, R1335Q,
T1337N
I562F, V565D, I570T, K608R, L625S, E627K, T638P, V647I, R654I, G752R, R753G, N803S,
N808D, K959N, M1021L, R1114G, D1135N, N1177S, N1234D, D1332N, R1335Q, T1337N
I562F, I570T, K608R, E627K, T638P, V647I, R753G, E790A, N803S, K959N, V1015A, Y1036H,
R1114G, D1135N, D1180E, A1184T, E1219V, D1332N, R1335Q, T1337N
I570T, K608R, E627K, T638P, V647I, R654H, R753G, E790A, N803S, K959N, V1015A, R1114G,
D1127A, D1135N, E1219V, D1332N, R1335Q, T1337N
I570T, K608R, L625S, E627K, T638P, V647I, R654I, T703P, R753G, N803S, N808D, K959N,
M1021L, R1114G, D1135N, E1219V, D1332N, R1335Q, T1337N
I570S, K608R, E627K, E630G, T638P, V647I, R653K, R753G, I795L, N803S, K866R, K890N,
K959N, Y1016C, R1114G, D1135N, E1219V, D1332N, R1335Q, T1337N
I570T, K608R, E627K, T638P, V647I, R654H, R753G, E790A, N803S, K959N, V1016A, R1114G,
D1135N, E1219V, K1246E, D1332N, R1335Q, T1337N
K608R, E627K, T638P, V647I, R654L, K673E, R753G, E790A, N803S, K948E, K959N, R1114G,
D1127G, D1135N, D1180E, E1219V, N1286H, D1332N, R1335Q, T1337N
K608R, L625S, E627K, T638P, V647I, R654I, I670T, R753G, N803S, N808D, K959N, M1021L,
R1114G, D1135N, E1219V, N1286H, D1332N, R1335Q, T1337N
E627K, M631V, T638P, V647I, K710E, R753G, N803S, N808D, K948E, M1021L, R1114G,
D1135N, E1219V, D1332N, R1335Q, T1337N, S1338T, H1349R

[0194] In some embodiments, the Cas9 protein comprises an amino acid sequence that is at least 80% identical to the amino acid sequence of a Cas9 protein as provided by any one of the variants of Table 2. In some embodiments, the Cas9 protein comprises an amino acid sequence that is at least 85%, at least 90%, at least 92%, at least 95%, at least 96%, at least 97%, at least 98%, at least 99%, or at least 99.5% identical to the amino acid sequence of a Cas9 protein as provided by any one of the variants of Table 2.

[0195] In some embodiments, the Cas9 protein exhibits an increased activity on a target sequence that does not comprise the canonical PAM (5′-NGG-3′) at its 3′ end as compared to Streptococcus pyogenes Cas9 as provided by SEQ ID NO: 74. In some embodiments, the Cas9 protein exhibits an activity on a target sequence having a 3′ end that is not directly adjacent to the canonical PAM sequence (5′-NGG-3′) that is at least 5-fold increased as compared to the activity of Streptococcus pyogenes Cas9 as provided by SEQ ID NO: 74 on the same target sequence. In some embodiments, the Cas9 protein exhibits an activity on a target sequence that is not directly adjacent to the canonical PAM sequence (5′-NGG-3′) that is at least 10-fold, at least 50-fold, at least 100-fold, at least 500-fold, at least 1,000-fold, at least 5,000-fold, at least 10,000-fold, at least 50,000-fold, at least 100,000-fold, at least 500,000-fold, or at least 1,000,000-fold increased as compared to the activity of Streptococcus pyogenes as provided by SEQ ID NO: 74 on the same target sequence. In some embodiments, the 3′ end of the target sequence is directly adjacent to an AAC, GAC, CAC, or TAC sequence.

[0196] In some embodiments, the Cas9 protein comprises a combination of mutations that exhibit activity on a target sequence comprising a 5′-NAT-3′ PAM sequence at its 3′-end. In some embodiments, the combinations of mutations are present in any one of the clones listed in Table 3. In some embodiments, the combinations of mutations are conservative mutations of the clones listed in Table 3. In some embodiments, the Cas9 protein comprises the combination of mutations of any one of the Cas9 clones listed in Table 3.

TABLE 3
NAT PAM Clones

MUTATIONS FROM WILD-TYPE SPCAS9 (E.G., SEQ ID NO: 74)
K961E, H985Y, D1135N, K1191N, E1219V, Q1221H, A1320A, P1321S, R1335L
D1135N, G1218S, E1219V, Q1221H, P1249S, P1321S, D1322G, R1335L
V743I, R753G, E790A, D1135N, G1218S, E1219V, Q1221H, A1227V, P1249S, N1286K, A1293T,
P1321S, D1322G, R1335L, T1339I
F575S, M631L, R654L, V748I, V743I, R753G, D853E, V922A, R1114G D1135N, G1218S,
E1219V, Q1221H, A1227V, P1249S, N1286K, A1293T, P1321S, D1322G, R1335L, T1339I
F575S, M631L, R654L, R664K, R753G, D853E, V922A, R1114G D1135N, D1180G, G1218S,
E1219V, Q1221H, P1249S, N1286K, P1321S, D1322G, R1335L
M631L, R654L, R753G, K797E, D853E, V922A, D1012A, R1114G D1135N, G1218S, E1219V,
Q1221H, P1249S, N1317K, P1321S, D1322G, R1335L
F575S, M631L, R654L, R664K, R753G, D853E, V922A, R1114G, Y1131C, D1135N, D1180G,
G1218S, E1219V, Q1221H, P1249S, P1321S, D1322G, R1335L
F575S, M631L, R654L, R664K, R753G, D853E, V922A, R1114G, Y1131C, D1135N, D1180G,
G1218S, E1219V, Q1221H, P1249S, P1321S, D1322G, R1335L
F575S, D596Y, M631L, R654L, R664K, R753G, D853E, V922A, R1114G, Y1131C, D1135N,
D1180G, G1218S, E1219V, Q1221H, P1249S, Q1256R, P1321S, D1322G, R1335L
F575S, M631L, R654L, R664K, K710E, V750A, R753G, D853E, V922A, R1114G, Y1131C,
D1135N, D1180G, G1218S, E1219V, Q1221H, P1249S, P1321S, D1322G, R1335L
F575S, M631L, K649R, R654L, R664K, R753G, D853E, V922A, R1114G, Y1131C, D1135N,
K1156E, D1180G, G1218S, E1219V, Q1221H, P1249S, P1321S, D1322G, R1335L
F575S, M631L, R654L, R664K, R753G, D853E, V922A, R1114G, Y1131C, D1135N, D1180G,
G1218S, E1219V, Q1221H, P1249S, P1321S, D1322G, R1335L
F575S, M631L, R654L, R664K, R753G, D853E, V922A, I1057G, R1114G, Y1131C, D1135N,
D1180G, G1218S, E1219V, Q1221H, P1249S, N1308D, P1321S, D1322G, R1335L
M631L, R654L, R753G, D853E, V922A, R1114G, Y1131C, D1135N, E1150V, D1180G, G1218S,
E1219V, Q1221H, P1249S, P1321S, D1332G, R1335L
M631L, R654L, R664K, R753G, D853E, I1057V, Y1131C, D1135N, D1180G, G1218S, E1219V,
Q1221H, P1249S, P1321S, D1332G, R1335L
M631L, R654L, R664K, R753G, I1057V, R1114G, Y1131C, D1135N, D1180G, G1218S, E1219V,
Q1221H, P1249S, P1321S, D1332G, R1335L

[0197] The above description of various napDNAbps which can be used in connection with the presently disclose base editors is not meant to be limiting in any way. The base editors may comprise the canonical SpCas9, or any ortholog Cas9 protein, or any variant Cas9 protein—including any naturally occurring variant, mutant, or otherwise engineered version of Cas9—that is known or which can be made or evolved through a directed evolutionary or otherwise mutagenic process. In various embodiments, the Cas9 or Cas9 variants have a nickase activity, i.e., only cleave of strand of the target DNA sequence. In other embodiments, the Cas9 or Cas9 variants have inactive nucleases, i.e., are “dead” Cas9 proteins. Other variant Cas9 proteins that may be used are those having a smaller molecular weight than the canonical SpCas9 (e.g., for easier delivery) or having modified or rearranged primary amino acid structure (e.g., the circular permutant formats). The base editors described herein may also comprise Cas9 equivalents, including Cas12a/Cpf1 and Cas12b proteins which are the result of convergent evolution. The napDNAbps used herein (e.g., SpCas9, Cas9 variant, or Cas9 equivalents) may also contain various modifications that alter/enhance their PAM specificities. Lastly, the application contemplates any Cas9, Cas9 variant, or Cas9 equivalent which has at least 70%, at least 75%, at least 80%, at least 85%, at least 90%, at least 91%, at least 92%, at least 93%, at least 94%, at least 95%, at least 96%, at least 97%, at least 98%, at least 99%, or at least 99.9% sequence identity to a reference Cas9 sequence, such as a references SpCas9 canonical sequences or a reference Cas9 equivalent (e.g., Cas12a/Cpf1).

[0198] In a particular embodiment, the Cas9 variant having expanded PAM capabilities is SpCas9 (H840A) VRQR, having the following amino acid sequence (with the V, R, Q, R substitutions relative to the SpCas9 (H840A) of SEQ ID NO: 107 show in bold underline. In addition, the methionine residue in SpCas9 (H840) was removed for SpCas9 (H840A) (VRQR) (“SpCas9-VRQR”). This SpCas9 variant possesses an altered PAM-specificity which recognizes a PAM of 5′-NGA-3′ instead of the canonical PAM of 5′-NGG-3′:

SpCas9-VRQR
(SEQ ID NO: 133)
DKKYSIGLDIGTNSVGWAVITDEYKVPSKKFKVLGNTDRHSIKKNLIGAL
LFDSGETAEATRLKRTARRRYTRRKNRICYLQEIFSNEMAKVDDSFFHRL
EESFLVEEDKKHERHPIFGNIVDEVAYHEKYPTIYHLRKKLVDSTDKADL
RLIYLALAHMIKFRGHFLIEGDLNPDNSDVDKLFIQLVQTYNQLFEENPI
NASGVDAKAILSARLSKSRRLENLIAQLPGEKKNGLFGNLIALSLGLTPN
FKSNFDLAEDAKLQLSKDTYDDDLDNLLAQIGDQYADLFLAAKNLSDAIL
LSDILRVNTEITKAPLSASMIKRYDEHHQDLTLLKALVRQQLPEKYKEIF
FDQSKNGYAGYIDGGASQEEFYKFIKPILEKMDGTEELLVKLNREDLLRK
QRTFDNGSIPHQIHLGELHAILRRQEDFYPFLKDNREKIEKILTFRIPYY
VGPLARGNSRFAWMTRKSEETITPWNFEEVVDKGASAQSFIERMTNFDKN
LPNEKVLPKHSLLYEYFTVYNELTKVKYVTEGMRKPAFLSGEQKKAIVDL
LFKTNRKVTVKQLKEDYFKKIECFDSVEISGVEDRFNASLGTYHDLLKII
KDKDFLDNEENEDILEDIVLTLTLFEDREMIEERLKTYAHLFDDKVMKQL
KRRRYTGWGRLSRKLINGIRDKQSGKTILDFLKSDGFANRNFMQLIHDDS
LTFKEDIQKAQVSGQGDSLHEHIANLAGSPAIKKGILQTVKVVDELVKVM
GRHKPENIVIEMARENQTTQKGQKNSRERMKRIEEGIKELGSQILKEHPV
ENTQLQNEKLYLYYLQNGRDMYVDQELDINRLSDYDVDAIVPQSFLKDDS
IDNKVLTRSDKNRGKSDNVPSEEVVKKMKNYWRQLLNAKLITQRKFDNLT
KAERGGLSELDKAGFIKRQLVETRQITKHVAQILDSRMNTKYDENDKLIR
EVKVITLKSKLVSDFRKDFQFYKVREINNYHHAHDAYLNAVVGTALIKKY
PKLESEFVYGDYKVYDVRKMIAKSEQEIGKATAKYFFYSNIMNFFKTEIT
LANGEIRKRPLIETNGETGEIVWDKGRDFATVRKVLSMPQVNIVKKTEVQ
TGGFSKESILPKRNSDKLIARKKDWDPKKYGGFVSPTVAYSVLVVAKVEK
GKSKKLKSVKELLGITIMERSSFEKNPIDFLEAKGYKEVKKDLIIKLPKY
SLFELENGRKRMLASARELQKGNELALPSKYVNFLYLASHYEKLKGSPED
NEQKQLFVEQHKHYLDEIIEQISEFSKRVILADANLDKVLSAYNKHRDKP
IREQAENIIHLFTLTNLGAPAAFKYFDTTIDRKQYRSTKEVLDATLIHQS
ITGLYETRIDLSQLGGD

[0199] In another particular embodiment, the Cas9 variant having expanded PAM capabilities is SpCas9 (H840A) VQR, having the following amino acid sequence (with the V, Q, R substitutions relative to the SpCas9 (H840A) of SEQ ID NO: 42 show in bold underline. In addition, the methionine residue in SpCas9 (H840) was removed for SpCas9 (H840A) VRQR) (“SpCas9-VQR”). This SpCas9 variant possesses an altered PAM-specificity which recognizes a PAM of 5′-NGA-3′ instead of the canonical PAM of 5′-NGG-3′:

SpCas9-VQR
(SEQ ID NO: 59)
DKKYSIGLDIGTNSVGWAVITDEYKVPSKKFKVLGNTDRHSIKKNLIGAL
LFDSGETAEATRLKRTARRRYTRRKNRICYLQEIFSNEMAKVDDSFFHRL
EESFLVEEDKKHERHPIFGNIVDEVAYHEKYPTIYHLRKKLVDSTDKADL
RLIYLALAHMIKFRGHFLIEGDLNPDNSDVDKLFIQLVQTYNQLFEENPI
NASGVDAKAILSARLSKSRRLENLIAQLPGEKKNGLFGNLIALSLGLTPN
FKSNFDLAEDAKLQLSKDTYDDDLDNLLAQIGDQYADLFLAAKNLSDAIL
LSDILRVNTEITKAPLSASMIKRYDEHHQDLTLLKALVRQQLPEKYKEIF
FDQSKNGYAGYIDGGASQEEFYKFIKPILEKMDGTEELLVKLNREDLLRK
QRTFDNGSIPHQIHLGELHAILRRQEDFYPFLKDNREKIEKILTFRIPYY
VGPLARGNSRFAWMTRKSEETITPWNFEEVVDKGASAQSFIERMTNFDKN
LPNEKVLPKHSLLYEYFTVYNELTKVKYVTEGMRKPAFLSGEQKKAIVDL
LFKTNRKVTVKQLKEDYFKKIECFDSVEISGVEDRFNASLGTYHDLLKII
KDKDFLDNEENEDILEDIVLTLTLFEDREMIEERLKTYAHLFDDKVMKQL
KRRRYTGWGRLSRKLINGIRDKQSGKTILDFLKSDGFANRNFMQLIHDDS
LTFKEDIQKAQVSGQGDSLHEHIANLAGSPAIKKGILQTVKVVDELVKVM
GRHKPENIVIEMARENQTTQKGQKNSRERMKRIEEGIKELGSQILKEHPV
ENTQLQNEKLYLYYLQNGRDMYVDQELDINRLSDYDVDAIVPQSFLKDDS
IDNKVLTRSDKNRGKSDNVPSEEVVKKMKNYWRQLLNAKLITQRKFDNLT
KAERGGLSELDKAGFIKRQLVETRQITKHVAQILDSRMNTKYDENDKLIR
EVKVITLKSKLVSDFRKDFQFYKVREINNYHHAHDAYLNAVVGTALIKKY
PKLESEFVYGDYKVYDVRKMIAKSEQEIGKATAKYFFYSNIMNFFKTEIT
LANGEIRKRPLIETNGETGEIVWDKGRDFATVRKVLSMPQVNIVKKTEVQ
TGGFSKESILPKRNSDKLIARKKDWDPKKYGGFVSPTVAYSVLVVAKVEK
GKSKKLKSVKELLGITIMERSSFEKNPIDFLEAKGYKEVKKDLIIKLPKY
SLFELENGRKRMLASAGELQKGNELALPSKYVNFLYLASHYEKLKGSPED
NEQKQLFVEQHKHYLDEIIEQISEFSKRVILADANLDKVLSAYNKHRDKP
IREQAENIIHLFTLTNLGAPAAFKYFDTTIDRKQYRSTKEVLDATLIHQS
ITGLYETRIDLSQLGGD

[0200] In another particular embodiment, the Cas9 variant having expanded PAM capabilities is SpCas9 (H840A) VRER, having the following amino acid sequence (with the V, R, E, R substitutions relative to the SpCas9 (H840A) of SEQ ID NO: 107 are shown in bold underline. In addition, the methionine residue in SpCas9 (H840) was removed for SpCas9 (H840A) VRER) (“SpCas9-VRER”). This SpCas9 variant possesses an altered PAM-specificity which recognizes a PAM of 5′-NGCG-3′ instead of the canonical PAM of 5′-NGG-3′:

SpCas9-VRER
(SEQ ID NO: 134)
DKKYSIGLDIGTNSVGWAVITDEYKVPSKKFKVLGNTDRHSIKKNLIGAL
LFDSGETAEATRLKRTARRRYTRRKNRICYLQEIFSNEMAKVDDSFFHRL
EESFLVEEDKKHERHPIFGNIVDEVAYHEKYPTIYHLRKKLVDSTDKADL
RLIYLALAHMIKFRGHFLIEGDLNPDNSDVDKLFIQLVQTYNQLFEENPI
NASGVDAKAILSARLSKSRRLENLIAQLPGEKKNGLFGNLIALSLGLTPN
FKSNFDLAEDAKLQLSKDTYDDDLDNLLAQIGDQYADLFLAAKNLSDAIL
LSDILRVNTEITKAPLSASMIKRYDEHHQDLTLLKALVRQQLPEKYKEIF
FDQSKNGYAGYIDGGASQEEFYKFIKPILEKMDGTEELLVKLNREDLLRK
QRTFDNGSIPHQIHLGELHAILRRQEDFYPFLKDNREKIEKILTFRIPYY
VGPLARGNSRFAWMTRKSEETITPWNFEEVVDKGASAQSFIERMTNFDKN
LPNEKVLPKHSLLYEYFTVYNELTKVKYVTEGMRKPAFLSGEQKKAIVDL
LFKTNRKVTVKQLKEDYFKKIECFDSVEISGVEDRFNASLGTYHDLLKII
KDKDFLDNEENEDILEDIVLTLTLFEDREMIEERLKTYAHLFDDKVMKQL
KRRRYTGWGRLSRKLINGIRDKQSGKTILDFLKSDGFANRNFMQLIHDDS
LTFKEDIQKAQVSGQGDSLHEHIANLAGSPAIKKGILQTVKVVDELVKVM
GRHKPENIVIEMARENQTTQKGQKNSRERMKRIEEGIKELGSQILKEHPV
ENTQLQNEKLYLYYLQNGRDMYVDQELDINRLSDYDVDAIVPQSFLKDDS
IDNKVLTRSDKNRGKSDNVPSEEVVKKMKNYWRQLLNAKLITQRKFDNLT
KAERGGLSELDKAGFIKRQLVETRQITKHVAQILDSRMNTKYDENDKLIR
EVKVITLKSKLVSDFRKDFQFYKVREINNYHHAHDAYLNAVVGTALIKKY
PKLESEFVYGDYKVYDVRKMIAKSEQEIGKATAKYFFYSNIMNFFKTEIT
LANGEIRKRPLIETNGETGEIVWDKGRDFATVRKVLSMPQVNIVKKTEVQ
TGGFSKESILPKRNSDKLIARKKDWDPKKYGGFVSPTVAYSVLVVAKVEK
GKSKKLKSVKELLGITIMERSSFEKNPIDFLEAKGYKEVKKDLIIKLPKY
SLFELENGRKRMLASARELQKGNELALPSKYVNFLYLASHYEKLKGSPED
NEQKQLFVEQHKHYLDEIIEQISEFSKRVILADANLDKVLSAYNKHRDKP
IREQAENIIHLFTLTNLGAPAAFKYFDTTIDRKEYRSTKEVLDATLIHQS
ITGLYETRIDLSQLGGD

[0201] In yet another particular embodiment, the Cas9 variant having expanded PAM capabilities is SpCas9-NG, as reported in Nishimasu et al., “Engineered CRISPR-Cas9 nuclease with expanded targeting space,” Science, 2018, 361: 1259-1262, which is incorporated herein by reference. SpCas9-NG (VRVRFRR), having the following amino acid sequence substitutions: R1335V, L1111R, D1135V, G1218R, E1219F, A1322R, and T1337R relative to the canonical SpCas9 sequence (SEQ ID NO: 5. This SpCas9 has a relaxed PAM specificity, i.e., with activity on a PAM of NGH (wherein H=A, T, or C). See Nishimasu et al., “Engineered CRISPR-Cas9 nuclease with expanded targeting space,” Science, 2018, 361: 1259-1262, which is incorporated herein by reference.

SpCas9-NG
(SEQ ID NO: 60)
MDKKYSIGLDIGTNSVGWAVITDEYKVPSKKFKVLGNTDRHSIKKNLIGA
LLFDSGETAEATRLKRTARRRYTRRKNRICYLQEIFSNEMAKVDDSFFHR
LEESFLVEEDKKHERHPIFGNIVDEVAYHEKYPTIYHLRKKLVDSTDKAD
LRLIYLALAHMIKFRGHFLIEGDLNPDNSDVDKLFIQLVQTYNQLFEENP
INASGVDAKAILSARLSKSRRLENLIAQLPGEKKNGLFGNLIALSLGLTP
NFKSNFDLAEDAKLQLSKDTYDDDLDNLLAQIGDQYADLFLAAKNLSDAI
LLSDILRVNTEITKAPLSASMIKRYDEHHQDLTLLKALVRQQLPEKYKEI
FFDQSKNGYAGYIDGGASQEEFYKFIKPILEKMDGTEELLVKLNREDLLR
KQRTFDNGSIPHQIHLGELHAILRRQEDFYPFLKDNREKIEKILTFRIPY
YVGPLARGNSRFAWMTRKSEETITPWNFEEVVDKGASAQSFIERMTNFDK
NLPNEKVLPKHSLLYEYFTVYNELTKVKYVTEGMRKPAFLSGEQKKAIVD
LLFKTNRKVTVKQLKEDYFKKIECFDSVEISGVEDRFNASLGTYHDLLKI
IKDKDFLDNEENEDILEDIVLTLTLFEDREMIEERLKTYAHLFDDKVMKQ
LKRRRYTGWGRLSRKLINGIRDKQSGKTILDFLKSDGFANRNFMQLIHDD
SLTFKEDIQKAQVSGQGDSLHEHIANLAGSPAIKKGILQTVKVVDELVKV
MGRHKPENIVIEMARENQTTQKGQKNSRERMKRIEEGIKELGSQILKEHP
VENTQLQNEKLYLYYLQNGRDMYVDQELDINRLSDYDVDHIVPQSFLKDD
SIDNKVLTRSDKNRGKSDNVPSEEVVKKMKNYWRQLLNAKLITQRKFDNL
TKAERGGLSELDKAGFIKRQLVETRQITKHVAQILDSRMNTKYDENDKLI
REVKVITLKSKLVSDFRKDFQFYKVREINNYHHAHDAYLNAVVGTALIKK
YPKLESEFVYGDYKVYDVRKMIAKSEQEIGKATAKYFFYSNIMNFFKTEI
TLANGEIRKRPLIETNGETGEIVWDKGRDFATVRKVLSMPQVNIVKKTEV
QTGGFSKESIRPKRNSDKLIARKKDWDPKKYGGFVSPTVAYSVLVVAKVE
KGKSKKLKSVKELLGITIMERSSFEKNPIDFLEAKGYKEVKKDLIIKLPK
YSLFELENGRKRMLASARFLQKGNELALPSKYVNFLYLASHYEKLKGSPE
DNEQKQLFVEQHKHYLDEIIEQISEFSKRVILADANLDKVLSAYNKHRDK
PIREQAENIIHLFTLTNLGAPRAFKYFDTTIDRKVYRSTKEVLDATLIHQ
SITGLYETRIDLSQLGGD

[0202] In addition, any available methods may be utilized to obtain or construct a variant or mutant Cas9 protein. The term “mutation,” as used herein, refers to a substitution of a residue within a sequence, e.g., a nucleic acid or amino acid sequence, with another residue, or a deletion or insertion of one or more residues within a sequence. Mutations are typically described herein by identifying the original residue followed by the position of the residue within the sequence and by the identity of the newly substituted residue. Various methods for making the amino acid substitutions (mutations) provided herein are well known in the art, and are provided by, for example, Green and Sambrook, Molecular Cloning: A Laboratory Manual (4th ed., Cold Spring Harbor Laboratory Press, Cold Spring Harbor, N.Y. (2012)). Mutations can include a variety of categories, such as single base polymorphisms, microduplication regions, indel, and inversions, and is not meant to be limiting in any way. Mutations can include “loss-of-function” mutations which are the normal result of a mutation that reduces or abolishes a protein activity. Most loss-of-function mutations are recessive, because in a heterozygote the second chromosome copy carries an unmutated version of the gene coding for a fully functional protein whose presence compensates for the effect of the mutation. Mutations also embrace “gain-of-function” mutations, which is one which confers an abnormal activity on a protein or cell that is otherwise not present in a normal condition. Many gain-of-function mutations are in regulatory sequences rather than in coding regions, and can therefore have a number of consequences. For example, a mutation might lead to one or more genes being expressed in the wrong tissues, these tissues gaining functions that they normally lack. Because of their nature, gain-of-function mutations are usually dominant.

[0203] Mutations can be introduced into a reference Cas9 protein using site-directed mutagenesis. Older methods of site-directed mutagenesis known in the art rely on sub-cloning of the sequence to be mutated into a vector, such as an M13 bacteriophage vector, that allows the isolation of single-stranded DNA template. In these methods, one anneals a mutagenic primer (i.e., a primer capable of annealing to the site to be mutated but bearing one or more mismatched nucleotides at the site to be mutated) to the single-stranded template and then polymerizes the complement of the template starting from the 3′ end of the mutagenic primer. The resulting duplexes are then transformed into host bacteria and plaques are screened for the desired mutation. More recently, site-directed mutagenesis has employed PCR methodologies, which have the advantage of not requiring a single-stranded template. In addition, methods have been developed that do not require sub-cloning. Several issues must be considered when PCR-based site-directed mutagenesis is performed. First, in these methods it is desirable to reduce the number of PCR cycles to prevent expansion of undesired mutations introduced by the polymerase. Second, a selection must be employed in order to reduce the number of non-mutated parental molecules persisting in the reaction. Third, an extended-length PCR method is preferred in order to allow the use of a single PCR primer set. And fourth, because of the non-template-dependent terminal extension activity of some thermostable polymerases it is often necessary to incorporate an end-polishing step into the procedure prior to blunt-end ligation of the PCR-generated mutant product.

[0204] Mutations may also be introduced by directed evolution processes, such as phage-assisted continuous evolution (PACE) or phage-assisted noncontinuous evolution (PANCE). The term “phage-assisted continuous evolution (PACE),” as used herein, refers to continuous evolution that employs phage as viral vectors. The general concept of PACE technology has been described, for example, in International PCT Application, PCT/US2009/056194, filed Sep. 8, 2009, published as WO 2010/028347 on Mar. 11, 2010; International PCT Application, PCT/US2011/066747, filed Dec. 22, 2011, published as WO 2012/088381 on Jun. 28, 2012; U.S. Application, U.S. Pat. No. 9,023,594, issued May 5, 2015, International PCT Application, PCT/US2015/012022, filed Jan. 20, 2015, published as WO 2015/134121 on Sep. 11, 2015, and International PCT Application, PCT/US2016/027795, filed Apr. 15, 2016, published as WO 2016/168631 on Oct. 20, 2016, the entire contents of each of which are incorporated herein by reference. Variant Cas9s may also be obtain by phage-assisted non-continuous evolution (PANCE),” which as used herein, refers to non-continuous evolution that employs phage as viral vectors. PANCE is a simplified technique for rapid in vivo directed evolution using serial flask transfers of evolving ‘selection phage’ (SP), which contain a gene of interest to be evolved, across fresh E. coli host cells, thereby allowing genes inside the host E. coli to be held constant while genes contained in the SP continuously evolve. Serial flask transfers have long served as a widely-accessible approach for laboratory evolution of microbes, and, more recently, analogous approaches have been developed for bacteriophage evolution. The PANCE system features lower stringency than the PACE system.

[0205] (x) Cas9 Circular Permutants

[0206] In various embodiments, the base editors disclosed herein may comprise a circular permutant of Cas9.

[0207] The term “circularly permuted Cas9” or “circular permutant” of Cas9 or “CP-Cas9”) refers to any Cas9 protein, or variant thereof, that occurs or has been modify to engineered as a circular permutant variant, which means the N-terminus and the C-terminus of a Cas9 protein (e.g., a wild type Cas9 protein) have been topically rearranged. Such circularly permuted Cas9 proteins, or variants thereof, retain the ability to bind DNA when complexed with a guide RNA (gRNA). See, Oakes et al., “Protein Engineering of Cas9 for enhanced function,” Methods Enzymol, 2014, 546: 491-511 and Oakes et al., “CRISPR-Cas9 Circular Permutants as Programmable Scaffolds for Genome Modification,” Cell, Jan. 10, 2019, 176: 254-267, each of are incorporated herein by reference. The instant disclosure contemplates any previously known CP-Cas9 or use a new CP-Cas9 so long as the resulting circularly permuted protein retains the ability to bind DNA when complexed with a guide RNA (gRNA).

[0208] Any of the Cas9 proteins described herein, including any variant, ortholog, or naturally occurring Cas9 or equivalent thereof, may be reconfigured as a circular permutant variant.

[0209] In various embodiments, the circular permutants of Cas9 may have the following structure:

[0210] N-terminus-[original C-terminus]-[optional linker]-[original N-terminus]-C-terminus.

[0211] As an example, the present disclosure contemplates the following circular permutants of canonical S. pyogenes Cas9 (1368 amino acids of UniProtKB-Q99ZW2 (CAS9_STRP1) (numbering is based on the amino acid position in SEQ ID NO: 74)):

[0212] N-terminus-[1268-1368]-[optional linker]-[1-1267]-C-terminus;

[0213] N-terminus-[1168-1368]-[optional linker]-[1-1167]-C-terminus;

[0214] N-terminus-[1068-1368]-[optional linker]-[1-1067]-C-terminus;

[0215] N-terminus-[968-1368]-[optional linker]-[1-967]-C-terminus;

[0216] N-terminus-[868-1368]-[optional linker]-[1-867]-C-terminus;

[0217] N-terminus-[768-1368]-[optional linker]-[1-767]-C-terminus;

[0218] N-terminus-[668-1368]-[optional linker]-[1-667]-C-terminus;

[0219] N-terminus-[568-1368]-[optional linker]-[1-567]-C-terminus;

[0220] N-terminus-[468-1368]-[optional linker]-[1-467]-C-terminus;

[0221] N-terminus-[368-1368]-[optional linker]-[1-367]-C-terminus;

[0222] N-terminus-[268-1368]-[optional linker]-[1-267]-C-terminus;

[0223] N-terminus-[168-1368]-[optional linker]-[1-167]-C-terminus;

[0224] N-terminus-[68-1368]-[optional linker]-[1-67]-C-terminus; or

[0225] N-terminus-[10-1368]-[optional linker]-[1-9]-C-terminus, or the corresponding circular permutants of other Cas9 proteins (including other Cas9 orthologs, variants, etc).

[0226] In particular embodiments, the circular permuant Cas9 has the following structure (based on S. pyogenes Cas9 (1368 amino acids of UniProtKB-Q99ZW2 (CAS9_STRP1) (numbering is based on the amino acid position in SEQ ID NO: 74):

[0227] N-terminus-[102-1368]-[optional linker]-[1-101]-C-terminus;

[0228] N-terminus-[1028-1368]-[optional linker]-[1-1027]-C-terminus;

[0229] N-terminus-[1041-1368]-[optional linker]-[1-1043]-C-terminus;

[0230] N-terminus-[1249-1368]-[optional linker]-[1-1248]-C-terminus; or

[0231] N-terminus-[1300-1368]-[optional linker]-[1-1299]-C-terminus, or the corresponding circular permutants of other Cas9 proteins (including other Cas9 orthologs, variants, etc).

[0232] In still other embodiments, the circular permuant Cas9 has the following structure (based on S. pyogenes Cas9 (1368 amino acids of UniProtKB-Q99ZW2 (CAS9_STRP1) (numbering is based on the amino acid position in SEQ ID NO: 74):

[0233] N-terminus-[103-1368]-[optional linker]-[1-102]-C-terminus;

[0234] N-terminus-[1029-1368]-[optional linker]-[1-1028]-C-terminus;

[0235] N-terminus-[1042-1368]-[optional linker]-[1-1041]-C-terminus;

[0236] N-terminus-[1250-1368]-[optional linker]-[1-1249]-C-terminus; or

[0237] N-terminus-[1301-1368]-[optional linker]-[1-1300]-C-terminus, or the corresponding circular permutants of other Cas9 proteins (including other Cas9 orthologs, variants, etc).

[0238] In some embodiments, the circular permutant can be formed by linking a C-terminal fragment of a Cas9 to an N-terminal fragment of a Cas9, either directly or by using a linker, such as an amino acid linker. In some embodiments, The C-terminal fragment may correspond to the C-terminal 95% or more of the amino acids of a Cas9 (e.g., amino acids about 1300-1368), or the C-terminal 90%, 85%, 80%, 75%, 70%, 65%, 60%, 55%, 50%, 45%, 40%, 35%, 30%, 25%, 20%, 15%, 10%, or 5% or more of a Cas9 (e.g., any one of SEQ ID NOs: 18-25). The N-terminal portion may correspond to the N-terminal 95% or more of the amino acids of a Cas9 (e.g., amino acids about 1-1300), or the N-terminal 90%, 85%, 80%, 75%, 70%, 65%, 60%, 55%, 50%, 45%, 40%, 35%, 30%, 25%, 20%, 15%, 10%, or 5% or more of a Cas9 (e.g., of SEQ ID NO: 74).

[0239] In some embodiments, the circular permutant can be formed by linking a C-terminal fragment of a Cas9 to an N-terminal fragment of a Cas9, either directly or by using a linker, such as an amino acid linker. In some embodiments, the C-terminal fragment that is rearranged to the N-terminus, includes or corresponds to the C-terminal 30% or less of the amino acids of a Cas9 (e.g., amino acids 1012-1368 of SEQ ID NO: 74). In some embodiments, the C-terminal fragment that is rearranged to the N-terminus, includes or corresponds to the C-terminal 30%, 29%, 28%, 27%, 26%, 25%, 24%, 23%, 22%, 21%, 20%, 19%, 18%, 17%, 16%, 15%, 14%, 13%, 12%, 11%, 10%, 9%, 8%, 7%, 6%, 5%, 4%, 3%, 2%, or 1% of the amino acids of a Cas9 (e.g., the Cas9 of SEQ ID NO: 74). In some embodiments, the C-terminal fragment that is rearranged to the N-terminus, includes or corresponds to the C-terminal 410 residues or less of a Cas9 (e.g., the Cas9 of SEQ ID NO: 74). In some embodiments, the C-terminal portion that is rearranged to the N-terminus, includes or corresponds to the C-terminal 410, 400, 390, 380, 370, 360, 350, 340, 330, 320, 310, 300, 290, 280, 270, 260, 250, 240, 230, 220, 210, 200, 190, 180, 170, 160, 150, 140, 130, 120, 110, 100, 90, 80, 70, 60, 50, 40, 30, 20, or 10 residues of a Cas9 (e.g., the Cas9 of SEQ ID NO: 74). In some embodiments, the C-terminal portion that is rearranged to the N-terminus, includes or corresponds to the C-terminal 357, 341, 328, 120, or 69 residues of a Cas9 (e.g., the Cas9 of SEQ ID NO: 74).

[0240] In other embodiments, circular permutant Cas9 variants may be defined as a topological rearrangement of a Cas9 primary structure based on the following method, which is based on S. pyogenes Cas9 of SEQ ID NO: 74: (a) selecting a circular permutant (CP) site corresponding to an internal amino acid residue of the Cas9 primary structure, which dissects the original protein into two halves: an N-terminal region and a C-terminal region; (b) modifying the Cas9 protein sequence (e.g., by genetic engineering techniques) by moving the original C-terminal region (comprising the CP site amino acid) to precede the original N-terminal region, thereby forming a new N-terminus of the Cas9 protein that now begins with the CP site amino acid residue. The CP site can be located in any domain of the Cas9 protein, including, for example, the helical-II domain, the RuvCIII domain, or the CTD domain. For example, the CP site may be located (relative the S. pyogenes Cas9 of SEQ ID NO: 74) at original amino acid residue 181, 199, 230, 270, 310, 1010, 1016, 1023, 1029, 1041, 1247, 1249, or 1282. Thus, once relocated to the N-terminus, original amino acid 181, 199, 230, 270, 310, 1010, 1016, 1023, 1029, 1041, 1247, 1249, or 1282 would become the new N-terminal amino acid. Nomenclature of these CP-Cas9 proteins may be referred to as Cas9-CP¹⁸¹, Cas9-CP¹⁹⁹, Cas9-CP²³⁰, Cas9-CP²⁷⁰, Cas9-CP³¹⁰, Cas9-CP¹⁰¹⁰, Cas9-CP¹⁰¹⁶, Cas9-CP¹⁰²³, Cas9-CP¹⁰²⁹, Cas9-CP¹⁰⁴¹, Cas9-CP¹²⁴⁷, Cas9-CP¹²⁴⁹, and Cas9-CP¹²⁸², respectively. This description is not meant to be limited to making CP variants from SEQ ID NO: 74, but may be implemented to make CP variants in any Cas9 sequence, either at CP sites that correspond to these positions, or at other CP sites entirely. This description is not meant to limit the specific CP sites in any way. Virtually any CP site may be used to form a CP-Cas9 variant.

[0241] Exemplary CP-Cas9 amino acid sequences, based on the Cas9 of SEQ ID NO: 74, are provided below in which linker sequences are indicated by underlining and optional methionine (M) residues are indicated in bold. It should be appreciated that the disclosure provides CP-Cas9 sequences that do not include a linker sequence or that include different linker sequences. It should be appreciated that CP-Cas9 sequences may be based on Cas9 sequences other than that of SEQ ID NO: 74 and any examples provided herein are not meant to be limiting. Exemplary CP-Cas9 sequences are as follows:

| CP name | Sequence | SEQ ID NO: |
|---|---|---|
| CP1012 | DYKVYDVRKMIAKSEQEIGKATAKYFFYSNIMNFFKTEITLANGEIRKRPLIETN | SEQ ID NO: |
| | GETGEIVWDKGRDFATVRKVLSMPQVNIVKKTEVQTGGFSKESILPKRNSDKLIA | 282 |
| | RKKDWDPKKYGGFDSPTVAYSVLVVAKVEKGKSKKLKSVKELLGITIMERSSEEK | |
| | NPIDFLEAKGYKEVKKDLIIKLPKYSLFELENGRKRMLASAGELQKGNELALPSK | |
| | YVNFLYLASHYEKLKGSPEDNEQKQLFVEQHKHYLDEIIEQISEFSKRVILADAN | |
| | LDKVLSAYNKHRDKPIREQAENIIHLFTLTNLGAPAAFKYFDTTIDRKRYTSTKE | |
| | VLDATLIHQSITGLYETRIDLSQLGGDGGSGGSGGSGGSGGSGGSGGDKKYSIGL | |
| | AIGTNSVGWAVITDEYKVPSKKFKVLGNTDRHSIKKNLIGALLFDSGETAEATRL | |
| | KRTARRRYTRRKNRICYLQEIFSNEMAKVDDSFFHRLEESFLVEEDKKHERHPIF | |
| | GNIVDEVAYHEKYPTIYHLRKKLVDSTDKADLRLIYLALAHMIKFRGHFLIEGDL | |
| | NPDNSDVDKLFIQLVQTYNQLFEENPINASGVDAKAILSARLSKSRRLENLIAQL | |
| | PGEKKNGLFGNLIALSLGLTPNFKSNFDLAEDAKLQLSKDTYDDDLDNLLAQIGD | |
| | QYADLFLAAKNLSDAILLSDILRVNTEITKAPLSASMIKRYDEHHQDLTLLKALV | |
| | RQQLPEKYKEIFFDQSKNGYAGYIDGGASQEEFYKFIKPILEKMDGTEELLVKLN | |
| | REDLLRKQRTFDNGSIPHQIHLGELHAILRRQEDFYPFLKDNREKIEKILTFRIP | |
| | YYVGPLARGNSRFAWMTRKSEETITPWNFEEVVDKGASAQSFIERMTNFDKNLPN | |
| | EKVLPKHSLLYEYFTVYNELTKVKYVTEGMRKPAFLSGEQKKAIVDLLFKTNRKV | |
| | TVKQLKEDYFKKIECFDSVEISGVEDRFNASLGTYHDLLKIIKDKDFLDNEENED | |
| | ILEDIVLTLTLFEDREMIEERLKTYAHLFDDKVMKQLKRRRYTGWGRLSRKLING | |
| | IRDKQSGKTILDFLKSDGFANRNFMQLIHDDSLTFKEDIQKAQVSGQGDSLHEHI | |
| | ANLAGSPAIKKGILQTVKVVDELVKVMGRHKPENIVIEMARENQTTQKGQKNSRE | |
| | RMKRIEEGIKELGSQILKEHPVENTQLQNEKLYLYYLQNGRDMYVDQELDINRLS | |
| | DYDVDHIVPQSFLKDDSIDNKVLTRSDKNRGKSDNVPSEEVVKKMKNYWRQLLNA | |
| | KLITQRKFDNLTKAERGGLSELDKAGFIKRQLVETRQITKHVAQILDSRMNTKYD | |
| | ENDKLIREVKVITLKSKLVSDFRKDFQFYKVREINNYHHAHDAYLNAVVGTALIK | |
| | KYPKLESEFVYG | |
| CP1028 | EIGKATAKYFFYSNIMNFFKTEITLANGEIRKRPLIETNGETGEIVWDKGRDFAT | SEQ ID NO: |
| | VRKVLSMPQVNIVKKTEVQTGGFSKESILPKRNSDKLIARKKDWDPKKYGGFDSP | 283 |
| | TVAYSVLVVAKVEKGKSKKLKSVKELLGITIMERSSFEKNPIDFLEAKGYKEVKK | |
| | DLIIKLPKYSLFELENGRKRMLASAGELQKGNELALPSKYVNFLYLASHYEKLKG | |
| | SPEDNEQKQLFVEQHKHYLDEIIEQISEFSKRVILADANLDKVLSAYNKHRDKPI | |
| | REQAENIIHLFTLTNLGAPAAFKYFDTTIDRKRYTSTKEVLDATLIHQSITGLYE | |
| | TRIDLSQLGGDGGSGGSGGSGGSGGSGGSGGMDKKYSIGLAIGTNSVGWAVITDE | |
| | YKVPSKKFKVLGNTDRHSIKKNLIGALLFDSGETAEATRLKRTARRRYTRRKNRI | |
| | CYLQEIFSNEMAKVDDSFFHRLEESFLVEEDKKHERHPIFGNIVDEVAYHEKYPT | |
| | IYHLRKKLVDSTDKADLRLIYLALAHMIKFRGHFLIEGDLNPDNSDVDKLFIQLV | |
| | QTYNQLFEENPINASGVDAKAILSARLSKSRRLENLIAQLPGEKKNGLFGNLIAL | |
| | SLGLTPNFKSNFDLAEDAKLQLSKDTYDDDLDNLLAQIGDQYADLFLAAKNLSDA | |
| | ILLSDILRVNTEITKAPLSASMIKRYDEHHQDLTLLKALVRQQLPEKYKEIFFDQ | |
| | SKNGYAGYIDGGASQEEFYKFIKPILEKMDGTEELLVKLNREDLLRKQRTFDNGS | |
| | IPHQIHLGELHAILRRQEDFYPFLKDNREKIEKILTFRIPYYVGPLARGNSRFAW | |
| | MTRKSEETITPWNFEEVVDKGASAQSFIERMTNFDKNLPNEKVLPKHSLLYEYFT | |
| | VYNELTKVKYVTEGMRKPAFLSGEQKKAIVDLLFKTNRKVTVKQLKEDYFKKIEC | |
| | FDSVEISGVEDRFNASLGTYHDLLKIIKDKDFLDNEENEDILEDIVLTLTLFEDR | |
| | EMIEERLKTYAHLFDDKVMKQLKRRRYTGWGRLSRKLINGIRDKQSGKTILDFLK | |
| | SDGFANRNFMQLIHDDSLTFKEDIQKAQVSGQGDSLHEHIANLAGSPAIKKGILQ | |
| | TVKVVDELVKVMGRHKPENIVIEMARENQTTQKGQKNSRERMKRIEEGIKELGSQ | |
| | ILKEHPVENTQLQNEKLYLYYLQNGRDMYVDQELDINRLSDYDVDHIVPQSFLKD | |
| | DSIDNKVLTRSDKNRGKSDNVPSEEVVKKMKNYWRQLLNAKLITQRKFDNLTKAE | |
| | RGGLSELDKAGFIKRQLVETRQITKHVAQILDSRMNTKYDENDKLIREVKVITLK | |
| | SKLVSDFRKDFQFYKVREINNYHHAHDAYLNAVVGTALIKKYPKLESEFVYGDYK | |
| | VYDVRKMIAKSEQ | |
| CP1041 | NIMNFFKTEITLANGEIRKRPLIETNGETGEIVWDKGRDFATVRKVLSMPQVNIV | SEQ ID NO: |
| | KKTEVQTGGFSKESILPKRNSDKLIARKKDWDPKKYGGFDSPTVAYSVLVVAKVE | 284 |
| | KGKSKKLKSVKELLGITIMERSSFEKNPIDFLEAKGYKEVKKDLIIKLPKYSLFE | |
| | LENGRKRMLASAGELQKGNELALPSKYVNFLYLASHYEKLKGSPEDNEQKQLFVE | |
| | QHKHYLDEIIEQISEFSKRVILADANLDKVLSAYNKHRDKPIREQAENIIHLFTL | |
| | TNLGAPAAFKYFDTTIDRKRYTSTKEVLDATLIHQSITGLYETRIDLSQLGGDGG | |
| | SGGSGGSGGSGGSGGSGGDKKYSIGLAIGTNSVGWAVITDEYKVPSKKFKVLGNT | |
| | DRHSIKKNLIGALLFDSGETAEATRLKRTARRRYTRRKNRICYLQEIFSNEMAKV | |
| | DDSFFHRLEESFLVEEDKKHERHPIFGNIVDEVAYHEKYPTIYHLRKKLVDSTDK | |
| | ADLRLIYLALAHMIKFRGHFLIEGDLNPDNSDVDKLFIQLVQTYNQLFEENPINA | |
| | SGVDAKAILSARLSKSRRLENLIAQLPGEKKNGLFGNLIALSLGLTPNFKSNFDL | |
| | AEDAKLQLSKDTYDDDLDNLLAQIGDQYADLFLAAKNLSDAILLSDILRVNTEIT | |
| | KAPLSASMIKRYDEHHQDLTLLKALVRQQLPEKYKEIFFDQSKNGYAGYIDGGAS | |
| | QEEFYKFIKPILEKMDGTEELLVKLNREDLLRKQRTFDNGSIPHQIHLGELHAIL | |
| | RRQEDFYPFLKDNREKIEKILTFRIPYYVGPLARGNSRFAWMTRKSEETITPWNF | |
| | EEVVDKGASAQSFIERMTNFDKNLPNEKVLPKHSLLYEYFTVYNELTKVKYVTEG | |
| | MRKPAFLSGEQKKAIVDLLFKTNRKVTVKQLKEDYFKKIECFDSVEISGVEDRFN | |
| | ASLGTYHDLLKIIKDKDFLDNEENEDILEDIVLTLTLFEDREMIEERLKTYAHLF | |
| | DDKVMKQLKRRRYTGWGRLSRKLINGIRDKQSGKTILDFLKSDGFANRNFMQLIH | |
| | DDSLTFKEDIQKAQVSGQGDSLHEHIANLAGSPAIKKGILQTVKVVDELVKVMGR | |
| | HKPENIVIEMARENQTTQKGQKNSRERMKRIEEGIKELGSQILKEHPVENTQLQN | |
| | EKLYLYYLQNGRDMYVDQELDINRLSDYDVDHIVPQSFLKDDSIDNKVLTRSDKN | |
| | RGKSDNVPSEEWKKMKNYWRQLLNAKLITQRKFDNLTKAERGGLSELDKAGFIK | |
| | RQLVETRQITKHVAQILDSRMNTKYDENDKLIREVKVITLKSKLVSDFRKDFQFY | |
| | KVREINNYHHAHDAYLNAVVGTALIKKYPKLESEFVYGDYKVYDVRKMIAKSEQE | |
| | IGKATAKYFFYS | |
| CP1249 | PEDNEQKQLFVEQHKHYLDEIIEQISEFSKRVILADANLDKVLSAYNKHRDKPIR | SEQ ID NO: |
| | EQAENIIHLFTLTNLGAPAAFKYFDTTIDRKRYTSTKEVLDATLIHQSITGLYET | 285 |
| | RIDLSQLGGDGGSGGSGGSGGSGGSGGSGGMDKKYSIGLAIGTNSVGWAVITDEY | |
| | KVPSKKFKVLGNTDRHSIKKNLIGALLFDSGETAEATRLKRTARRRYTRRKNRIC | |
| | YLQEIFSNEMAKVDDSFFHRLEESFLVEEDKKHERHPIFGNIVDEVAYHEKYPTI | |
| | YHLRKKLVDSTDKADLRLIYLALAHMIKFRGHFLIEGDLNPDNSDVDKLFIQLVQ | |
| | TYNQLFEENPINASGVDAKAILSARLSKSRRLENLIAQLPGEKKNGLFGNLIALS | |
| | LGLTPNFKSNFDLAEDAKLQLSKDTYDDDLDNLLAQIGDQYADLFLAAKNLSDAI | |
| | LLSDILRVNTEITKAPLSASMIKRYDEHHQDLTLLKALVRQQLPEKYKEIFFDQS | |
| | KNGYAGYIDGGASQEEFYKFIKPILEKMDGTEELLVKLNREDLLRKQRTFDNGSI | |
| | PHQIHLGELHAILRRQEDFYPFLKDNREKIEKILTFRIPYYVGPLARGNSRFAWM | |
| | TRKSEETITPWNFEEVVDKGASAQSFIERMTNFDKNLPNEKVLPKHSLLYEYFTV | |
| | YNELTKVKYVTEGMRKPAFLSGEQKKAIVDLLFKTNRKVTVKQLKEDYFKKIECF | |
| | DSVEISGVEDRFNASLGTYHDLLKIIKDKDFLDNEENEDILEDIVLTLTLFEDRE | |
| | MIEERLKTYAHLFDDKVMKQLKRRRYTGWGRLSRKLINGIRDKQSGKTILDFLKS | |
| | DGFANRNFMQLIHDDSLTFKEDIQKAQVSGQGDSLHEHIANLAGSPAIKKGILQT | |
| | VKVVDELVKVMGRHKPENIVIEMARENQTTQKGQKNSRERMKRIEEGIKELGSQI | |
| | LKEHPVENTQLQNEKLYLYYLQNGRDMYVDQELDINRLSDYDVDHIVPQSFLKDD | |
| | SIDNKVLTRSDKNRGKSDNVPSEEVVKKMKNYWRQLLNAKLITQRKFDNLTKAER | |
| | GGLSELDKAGFIKRQLVETRQITKHVAQILDSRMNTKYDENDKLIREVKVITLKS | |
| | KLVSDFRKDFQFYKVREINNYHHAHDAYLNAVVGTALIKKYPKLESEFVYGDYKV | |
| | YDVRKMIAKSEQEIGKATAKYFFYSNIMNFFKTEITLANGEIRKRPLIETNGETG | |
| | EIVWDKGRDFATVRKVLSMPQVNIVKKTEVQTGGFSKESILPKRNSDKLIARKKD | |
| | WDPKKYGGFDSPTVAYSVLVVAKVEKGKSKKLKSVKELLGITIMERSSFEKNPID | |
| | FLEAKGYKEVKKDLIIKLPKYSLFELENGRKRMLASAGELQKGNELALPSKYVNF | |
| | LYLASHYEKLKGS | |
| CP1300 | KPIREQAENIIHLFTLTNLGAPAAFKYFDTTIDRKRYTSTKEVLDATLIHQSITG | SEQ ID NO: |
| | LYETRIDLSQLGGDGGSGGSGGSGGSGGSGGSGGDKKYSIGLAIGTNSVGWAVIT | 286 |
| | DEYKVPSKKFKVLGNTDRHSIKKNLIGALLFDSGETAEATRLKRTARRRYTRRKN | |
| | RICYLQEIFSNEMAKVDDSFFHRLEESFLVEEDKKHERHPIFGNIVDEVAYHEKY | |
| | PTIYHLRKKLVDSTDKADLRLIYLALAHMIKFRGHFLIEGDLNPDNSDVDKLFIQ | |
| | LVQTYNQLFEENPINASGVDAKAILSARLSKSRRLENLIAQLPGEKKNGLFGNLI | |
| | ALSLGLTPNFKSNFDLAEDAKLQLSKDTYDDDLDNLLAQIGDQYADLFLAAKNLS | |
| | DAILLSDILRVNTEITKAPLSASMIKRYDEHHQDLTLLKALVRQQLPEKYKEIFF | |
| | DQSKNGYAGYIDGGASQEEFYKFIKPILEKMDGTEELLVKLNREDLLRKQRTFDN | |
| | GSIPHQIHLGELHAILRRQEDFYPFLKDNREKIEKILTFRIPYYVGPLARGNSRF | |
| | AWMTRKSEETITPWNFEEVVDKGASAQSFIERMTNFDKNLPNEKVLPKHSLLYEY | |
| | FTVYNELTKVKYVTEGMRKPAFLSGEQKKAIVDLLFKTNRKVTVKQLKEDYFKKI | |
| | ECFDSVEISGVEDRFNASLGTYHDLLKIIKDKDFLDNEENEDILEDIVLTLTLFE | |
| | DREMIEERLKTYAHLFDDKVMKQLKRRRYTGWGRLSRKLINGIRDKQSGKTILDF | |
| | LKSDGFANRNFMQLIHDDSLTFKEDIQKAQVSGQGDSLHEHIANLAGSPAIKKGI | |
| | LQTVKVVDELVKVMGRHKPENIVIEMARENQTTQKGQKNSRERMKRIEEGIKELG | |
| | SQILKEHPVENTQLQNEKLYLYYLQNGRDMYVDQELDINRLSDYDVDHIVPQSFL | |
| | KDDSIDNKVLTRSDKNRGKSDNVPSEEVVKKMKNYWRQLLNAKLITQRKFDNLTK | |
| | AERGGLSELDKAGFIKRQLVETRQITKHVAQILDSRMNTKYDENDKLIREVKVIT | |
| | LKSKLVSDFRKDFQFYKVREINNYHHAHDAYLNAVVGTALIKKYPKLESEFVYGD | |
| | YKVYDVRKMIAKSEQEIGKATAKYFFYSNIMNFFKTEITLANGEIRKRPLIETNG | |
| | ETGEIVWDKGRDFATVRKVLSMPQVNIVKKTEVQTGGFSKESILPKRNSDKLIAR | |
| | KKDWDPKKYGGFDSPTVAYSVLVVAKVEKGKSKKLKSVKELLGITIMERSSFEKN | |
| | PIDFLEAKGYKEVKKDLIIKLPKYSLFELENGRKRMLASAGELQKGNELALPSKY | |
| | VNFLYLASHYEKLKGSPEDNEQKQLFVEQHKHYLDEIIEQISEFSKRVILADANL | |
| | DKVLSAYNKHRD | |

[0242] The Cas9 circular permutants that may be useful in the base editing constructs described herein. Exemplary C-terminal fragments of Cas9, based on the Cas9 of SEQ ID NO: 74, which may be rearranged to an N-terminus of Cas9, are provided below. It should be appreciated that such C-terminal fragments of Cas9 are exemplary and are not meant to be limiting. These exemplary CP-Cas9 fragments have the following sequences:

| CP name | Sequence | SEQ ID NO: |
|---|---|---|
| CP1012 c- | DYKVYDVRKMIAKSEQEIGKATAKYFFYSNIMNFFKTEITLANGEIRKRPLIETN | SEQ ID NO: |
| terminal | GETGEIVWDKGRDFATVRKVLSMPQVNIVKKTEVQTGGFSKESILPKRNSDKLIA | 287 |
| fragment | RKKDWDPKKYGGFDSPTVAYSVLVVAKVEKGKSKKLKSVKELLGITIMERSSFEK | |
| | NPIDFLEAKGYKEVKKDLIIKLPKYSLFELENGRKRMLASAGELQKGNELALPSK | |
| | YVNFLYLASHYEKLKGSPEDNEQKQLFVEQHKHYLDEIIEQISEFSKRVILADAN | |
| | LDKVLSAYNKHRDKPIREQAENIIHLFTLTNLGAPAAFKYFDTTIDRKRYTSTKE | |
| | VLDATLIHQSITGLYETRIDLSQLGGD | |
| CP1028 c- | EIGKATAKYFFYSNIMNFFKTEITLANGEIRKRPLIETNGETGEIVWDKGRDFAT | SEQ ID NO: |
| terminal | VRKVLSMPQVNIVKKTEVQTGGFSKESILPKRNSDKLIARKKDWDPKKYGGFDSP | 288 |
| fragment | TVAYSVLVVAKVEKGKSKKLKSVKELLGITIMERSSFEKNPIDFLEAKGYKEVKK | |
| | DLIIKLPKYSLFELENGRKRMLASAGELQKGNELALPSKYVNFLYLASHYEKLKG | |
| | SPEDNEQKQLFVEQHKHYLDEIIEQISEFSKRVILADANLDKVLSAYNKHRDKPI | |
| | REQAENIIHLFTLTNLGAPAAFKYFDTTIDRKRYTSTKEVLDATLIHQSITGLYE | |
| | TRIDLSQLGGD | |
| CP1041 c- | NIMNFFKTEITLANGEIRKRPLIETNGETGEIVWDKGRDFATVRKVLSMPQVNIV | SEQ ID NO: |
| terminal | KKTEVQTGGFSKESILPKRNSDKLIARKKDWDPKKYGGFDSPTVAYSVLVVAKVE | 289 |
| fragment | KGKSKKLKSVKELLGITIMERSSFEKNPIDFLEAKGYKEVKKDLIIKLPKYSLFE | |
| | LENGRKRMLASAGELQKGNELALPSKYVNFLYLASHYEKLKGSPEDNEQKQLFVE | |
| | QHKHYLDEIIEQISEFSKRVILADANLDKVLSAYNKHRDKPIREQAENIIHLFTL | |
| | TNLGAPAAFKYFDTTIDRKRYTSTKEVLDATLIHQSITGLYETRIDLSQLGGD | |
| CP1249 c- | PEDNEQKQLFVEQHKHYLDEIIEQISEFSKRVILADANLDKVLSAYNKHRDKPIR | SEQ ID NO: |
| terminal | EQAENIIHLFTLTNLGAPAAFKYFDTTIDRKRYTSTKEVLDATLIHQSITGLYET | 290 |
| fragment | RIDLSQLGGD | |
| CP1300 c- | KPIREQAENIIHLFTLTNLGAPAAFKYFDTTIDRKRYTSTKEVLDATLIHQSITG | SEQ ID NO: |
| terminal | LYETRIDLSQLGGD | 291 |
| fragment | | |

[0243] Any of the references noted above which relate to Cas9 or Cas9 equivalents are hereby incorporated by reference in their entireties, if not already stated so.

### Adenosine Deaminases

[0244] In some embodiments, the disclosure provides base editors, e.g., for editing a STETS locus, that comprise one or more adenosine deaminase domains. In some aspects, any of the disclosed base editors are capable of deaminating adenosine in a nucleic acid sequence (e.g., DNA or RNA). Without wishing to be bound by any particular theory, dimerization of adenosine deaminases (e.g., in cis or in trans) may improve the ability (e.g., efficiency) of the base editor to modify a nucleic acid base, for example to deaminate adenine.

[0245] Exemplary, non-limiting, embodiments of adenosine deaminases are provided herein. In some embodiments, the adenosine deaminase domain of any of the disclosed base editors comprises a single adenosine deaminase, or a monomer. In some embodiments, the adenosine deaminase domain comprises 2, 3, 4 or 5 adenosine deaminases. In some embodiments, the adenosine deaminase domain comprises two adenosine deaminases, or a dimer. In some embodiments, the deaminase domain comprises a dimer of an engineered (or evolved) deaminase and a wild-type deaminase, such as a wild-type E. coli deaminase. It should be appreciated that the mutations provided herein (e.g., mutations in ecTadA) may be applied to adenosine deaminases in other adenosine base editors, for example those provided in International Publication No. WO 2018/027078, published Aug. 2, 2018; International Application No PCT/US2019/033848, filed May 23, 2019, which published as International Publication No. WO 2019/226593 on Nov. 28, 2019; U.S. Patent Publication No. 2018/0073012, published Mar. 15, 2018, which issued as U.S. Pat. No. 10,113,163, on Oct. 30, 2018; U.S. Patent Publication No. 2017/0121693, published May 4, 2017, which issued as U.S. Pat. No. 10,167,457 on Jan. 1, 2019; International Publication No. WO 2017/070633, published Apr. 27, 2017; U.S. Patent Publication No. 2015/0166980, published Jun. 18, 2015; U.S. Pat. No. 9,840,699, issued Dec. 12, 2017; and U.S. Pat. No. 10,077,453, issued Sep. 18, 2018, and U.S. Provisional Application No. 62/835,490, filed Apr. 17, 2019; all of which are incorporated herein by reference in their entireties.

[0246] Some aspects of the disclosure provide adenosine deaminases, which are used as effector domains of base editors described herein. In some embodiments, the adenosine deaminases provided herein are capable of deaminating adenine. In some embodiments, the adenosine deaminases provided herein are capable of deaminating adenine in a deoxyadenosine residue of DNA. The adenosine deaminase may be derived from any suitable organism (e.g., E. coli). In some embodiments, the adenosine deaminase is a naturally-occurring adenosine deaminase that includes one or more mutations corresponding to any of the mutations provided herein (e.g., mutations in ecTadA). One of skill in the art will be able to identify the corresponding residue in any homologous protein and in the respective encoding nucleic acid by methods well known in the art, e.g., by sequence alignment and determination of homologous residues. Accordingly, one of skill in the art would be able to generate mutations in any naturally-occurring adenosine deaminase (e.g., having homology to ecTadA) that corresponds to any of the mutations described herein, e.g., any of the mutations identified in ecTadA. In some embodiments, the adenosine deaminase is derived from a prokaryote. In some embodiments, the adenosine deaminase is from a bacterium. In some embodiments, the adenosine deaminase is from Escherichia coli, Staphylococcus aureus, Salmonella typhi, Shewanella putrefaciens, Haemophilus influenzae, Caulobacter crescentus, or Bacillus subtilis. In some embodiments, the adenosine deaminase is from E. coli.

[0247] In some embodiments, the adenosine deaminase is at least 50%, at least 55%, at least 60%, at least 65%, at least 70%, at least 75% at least 80%, at least 85%, at least 90%, at least 95%, at least 96%, at least 97%, at least 98%, at least 99%, or at least 99.5% identical to a naturally-occurring adenosine deaminase. In some embodiments, the adenosine deaminase is from a bacterium, such as, E. coli, S. aureus, S. typhi, S. putrefaciens, H. influenzae, or C. crescentus. In some embodiments, the adenosine deaminase is a TadA deaminase. In some embodiments, the TadA deaminase is an E. coli TadA deaminase (ecTadA). In some embodiments, the TadA deaminase is a truncated E. coli TadA deaminase. For example, the truncated ecTadA may be missing one or more N-terminal amino acids relative to a full-length ecTadA. In some embodiments, the truncated ecTadA may be missing 1, 2, 3, 4, 5, 6, 7, 8, 9, 10, 11, 12, 13, 14, 15, 6, 17, 18, 19, or 20 N-terminal amino acid residues relative to the full length ecTadA. In some embodiments, the truncated ecTadA may be missing 1, 2, 3, 4, 5, 6, 7, 8, 9, 10, 11, 12, 13, 14, 15, 6, 17, 18, 19, or 20 C-terminal amino acid residues relative to the full length ecTadA. In some embodiments, the ecTadA deaminase does not comprise an N-terminal methionine.

[0248] In some embodiments, the adenosine deaminase may comprise one or more substitutions that include R26G, V69A, V88A, A109S, T111R, D119N, H122N, Y147D, F149Y, T1661, D167N relative to TadA7.10 (SEQ ID NO: 61), or a substitution at a corresponding amino acid in another adenosine deaminase. In some embodiments, the adenosine deaminase comprises T111R, D119N, and F149Y substitutions in TadA7.10 (SEQ ID NO: 61), or a corresponding mutation in another adenosine deaminase. In particular embodiments, the adenosine deaminase comprises T111R, D119N, and F149Y substitutions, and further comprises at least one substitution selected from R26C, V88A, A109S, H122N, T1661, and D167N, in TadA7.10 (SEQ ID NO: 61), or a corresponding mutation in another adenosine deaminase.

[0249] In some embodiments, the adenosine deaminase comprises A109S, T111R, D119N, H122N, F149Y, T1661, and D167N substitutions in TadA7.10 (SEQ ID NO: 61), or a corresponding mutation in another adenosine deaminase. In some embodiments, the adenosine deaminase comprises R26C, D108W, T111R, D119N, and F149Y substitutions in TadA7.10 (SEQ ID NO: 61), or a corresponding mutation in another adenosine deaminase. In some embodiments, the adenosine deaminase comprises V88A, D108W, T111R, D119N, and F149Y substitutions in TadA7.10 (SEQ ID NO: 61), or a corresponding mutation in another adenosine deaminase. In some embodiments, the adenosine deaminase further comprises a Y147D substitution in TadA7.10 (SEQ ID NO: 61), or a corresponding mutation in another adenosine deaminase.

[0250] In some embodiments, the adenosine deaminase comprises A109S, T111R, D119N, H122N, Y147D, F149Y, T1661 and D167N substitutions in TadA7.10 (SEQ ID NO: 61), or a corresponding mutation in another adenosine deaminase. In some embodiments, the adenosine deaminase comprises TadA-8e. In some embodiments, the adenosine deaminase comprises A109S, T111R, D119N, H122N, Y147D, F149Y, T1661 and D167N in TadA7.10 (SEQ ID NO: 61), or a corresponding mutation in another adenosine deaminase. In some embodiments, the adenosine deaminase further comprises at least one substitution selected from K20A, R21A, V82G, and V106W in TadA7.10 (SEQ ID NO: 61), or a corresponding mutation in another adenosine deaminase. In certain embodiments, the adenosine deaminase comprises V106W, A109S, T111R, D119N, H122N, Y147D, F149Y, T1661 and D167N substitutions in TadA7.10 (SEQ ID NO: 61), or a corresponding mutation in another adenosine deaminase. In some embodiments, the adenosine deaminase comprises TadA-8e(V106W). It should be appreciated, however, that additional deaminases may similarly be aligned to identify homologous amino acid residues that may be mutated as provided herein.

[0251] Exemplary adenosine deaminase variants of the disclosure are described below. In certain embodiments, the adenosine deaminase domain comprises an adenosine deaminase that has a sequence with at least 80%, at least 85%, at least 90%, at least 95%, at least 98%, at least 99%, or at least 99.5% sequence identity to one of the following:

E. coli TadA

[0252] In some embodiments, the TadA deaminase is an N-terminal truncated TadA. In certain embodiments, the adenosine deaminase comprises the amino acid sequence:

(SEQ ID NO: 1)
MSEVEFSHEYWMRHALTLAKRAWDEREVPVGAVLVHNNRVIGEGWNRPIG
RHDPTAHAEIMALRQGGLVMQNYRLIDATLYVTLEPCVMCAGAMIHSRIG
RVVFGARDAKTGAAGSLMDVLHHPGMNHRVEITEGILADECAALLSDFFR
MRRQEIKAQKKAQSSTD.
E. coli TadA 7.10
(SEQ ID NO: 61)
MSEVEFSHEYWMRHALTLAKRARDEREVPVGAVLVLNNRVIGEGWNRAIG
LHDPTAHAEIMALRQGGLVMQNYRLIDATLYVTFEPCVMCAGAMIHSRIG
RVVFGVRNAKTGAAGSLMDVLHYPGMNHRVEITEGILADECAALLCYFFR
MPRQVFNAQKKAQSSTD
E. coli TadA* 7.10
(SEQ ID NO: 10)
SEVEFSHEYWMRHALTLAKRARDEREVPVGAVLVLNNRVIGEGWNRAIGL
HDPTAHAEIMALRQGGLVMQNYRLIDATLYVTFEPCVMCAGAMIHSRIGR
VVFGVRNAKTGAAGSLMDVLHYPGMNHRVEITEGILADECAALLCYFFRM
PRQVFNAQKKAQSSTD.
ABE7.10 TadA* monomer
DNA sequence
(SEQ ID NO: 62)
TCTGAGGTGGAGTTTTCCCACGAGTACTGGATGAGACATGCCCTGACCCT
GGCCAAGAGGGCACGCGATGAGAGGGAGGTGCCTGTGGGAGCCGTGCTGG
TGCTGAACAATAGAGTGATCGGCGAGGGCTGGAACAGAGCCATCGGCCTG
CACGACCCAACAGCCCATGCCGAAATTATGGCCCTGAGACAGGGCGGCCT
GGTCATGCAGAACTACAGACTGATTGACGCCACCCTGTACGTGACATTCG
AGCCTTGCGTGATGTGCGCCGGCGCCATGATCCACTCTAGGATCGGCCGC
GTGGTGTTTGGCGTGAGGAACGCAAAAACCGGCGCCGCAGGCTCCCTGAT
GGACGTGCTGCACTACCCCGGCATGAATCACCGCGTCGAAATTACCGAGG
GAATCCTGGCAGATGAATGTGCCGCCCTGCTGTGCTATTTCTTTCGGATG
CCTAGACAGGTGTTCAATGCTCAGAAGAAGGCCCAGAGCTCCACCGAC
E. coli TadA 7.10 (V106W)
(SEQ ID NO: 71)
MSEVEFSHEYWMRHALTLAKRARDEREVPVGAVLVLNNRVIGEGWNRAIG
LHDPTAHAEIMALRQGGLVMQNYRLIDATLYVTFEPCVMCAGAMIHSRIG
RVVFGWRNAKTGAAGSLMDVLHYPGMNHRVEITEGILADECAALLCYFFR
MPRQVFNAQKKAQSSTD

[0253] In some embodiments the TadA deaminase is a full-length E. coli TadA deaminase. For example, in certain embodiments, the adenosine deaminase comprises the amino acid sequence:

(SEQ ID NO: 2)
MRRAFITGVFFLSEVEFSHEYWMRHALTLAKRAWDEREVPVGAVLVHNNR
VIGEGWNRPIGRHDPTAHAEIMALRQGGLVMQNYRLIDATLYVTLEPCVM
CAGAMIHSRIGRWFGARDAKTGAAGSLMDVLHHPGMNHRVEITEGILADE
CAALLSDFFRMRRQEIKAQKKAQSSTD

It should be appreciated, however, that additional adenosine deaminases useful in the present application would be apparent to the skilled artisan and are within the scope of this disclosure. For example, the adenosine deaminase may be a homolog of an ADAT. Exemplary ADAT homologs include, without limitation:

Staphylococcus aureus TadA:
(SEQ ID NO: 3)
MGSHMTNDIYFMTLAIEEAKKAAQLGEVPIGAIITKDDEVIARAHNLRET
LQQPTAHAEHIAIERAAKVLGSWRLEGCTLYVTLEPCVMCAGTIVMSRIP
RVVYGADDPKGGCSGSLMNLLQQSNFNHRAIVDKGVLKEACSTLLTTFFK
NLRANKKSTN
Bacillus subtilis TadA:
(SEQ ID NO: 4)
MTQDELYMKEAIKEAKKAEEKGEVPIGAVLVINGEIIARAHNLRETEQRS
IAHAEMLVIDEACKALGTWRLEGATLYVTLEPCPMCAGAVVLSRVEKVVF
GAFDPKGGCSGTLMNLLQEERFNHQAEVVSGVLEEECGGMLSAFFRELRK
KKKAARKNLSE
Salmonella typhimurium (S. typhimurium)
TadA:
(SEQ ID NO: 5)
MPPAFITGVTSLSDVELDHEYWMRHALTLAKRAWDEREVPVGAVLVHNHR
VIGEGWNRPIGRHDPTAHAEIMALRQGGLVLQNYRLLDTTLYVTLEPCVM
CAGAMVHSRIGRVVFGARDAKTGAAGSLIDVLHHPGMNHRVEIIEGVLRD
ECATLLSDFFRMRRQEIKALKKADRAEGAGPAV
Shewanella putrefaciens (S. putrefaciens)
TadA:
(SEQ ID NO: 6)
MDEYWMQVAMQMAEKAEAAGEVPVGAVLVKDGQQIATGYNLSISQHDPTA
HAEILCLRSAGKKLENYRLLDATLYITLEPCAMCAGAMVHSRIARVVYGA
RDEKTGAAGTVVNLLQHPAFNHQVEVTSGVLAEACSAQLSRFFKRRRDEK
KALKLAQRAQQGIE
Haemophilus influenzae F3031 (H. influenzae)
TadA:
(SEQ ID NO: 7)
MDAAKVRSEFDEKMMRYALELADKAEALGEIPVGAVLVDDARNIIGEGWN
LSIVQSDPTAHAEIIALRNGAKNIQNYRLLNSTLYVTLEPCTMCAGAILH
SRIKRLVFGASDYKTGAIGSRFHFFDDYKMNHTLEITSGVLAEECSQKLS
TFFQKRREEKKIEKALLKSLSDK
Caulobacter crescentus (C. crescentus)
TadA:
(SEQ ID NO: 8)
MRTDESEDQDHRMMRLALDAARAAAEAGETPVGAVILDPSTGEVIATAGN
GPIAAHDPTAHAEIAAMRAAAAKLGNYRLTDLTLVVTLEPCAMCAGAISH
ARIGRVVFGADDPKGGAVVHGPKFFAQPTCHWRPEVTGGVLADESADLLR
GFFRARRKAKI
Geobacter sulfurreducens (G. sulfurreducens)
TadA:
(SEQ ID NO: 9)
MSSLKKTPIRDDAYWMGKAIREAAKAAARDEVPIGAVIVRDGAVIGRGHN
LREGSNDPSAHAEMIAIRQAARRSANWRLTGATLYVTLEPCLMCMGAIIL
ARLERVVFGCYDPKGGAAGSLYDLSADPRLNHQVRLSPGVCQEECGTMLS
DFFRDLRRRKKAKATPALFIDERKVPPEP

[0254] In some embodiments, the TadA 7.10 of SEQ ID NO: 10 comprises an N-terminal methionine. It should be appreciated that the amino acid numbering scheme relating to the mutations in TadA 7.10 may be based on the TadA sequence of SEQ ID NO: 1, which contains an N-terminal methionine.

[0255] In some embodiments, the adenosine deaminase domain comprises an N-terminal truncated E. coli TadA. In certain embodiments, the adenosine deaminase comprises the amino acid sequence:

(SEQ ID NO: 1)
MSEVEFSHEYWMRHALTLAKRAWDEREVPVGAVLVHNNRVIGEGWNRPIG
RHDPTAHAEIMALRQGGLVMQNYRLIDATLYVTLEPCVMCAGAMIHSRIG
RVVFGARDAKTGAAGSLMDVLHHPGMNHRVEITEGILADECAALLSDFFR
MRRQEIKAQKKAQSSTD.

[0256] In some embodiments, the TadA deaminase is a full-length E. coli TadA deaminase (ecTadA). For example, in certain embodiments, the adenosine deaminase domain comprises a deaminase that comprises the amino acid sequence:

(SEQ ID NO: 2)
MRRAFITGVFFLSEVEFSHEYWMRHALTLAKRAWDEREVPVGAVLVHNNR
VIGEGWNRPIGRHDPTAHAEIMALRQGGLVMQNYRLIDATLYVTLEPCVM
CAGAMIHSRIGRWFGARDAKTGAAGSLMDVLHHPGMNHRVEITEGILADE
CAALLSDFFRMRRQEIKAQKKAQSSTD
ABE8 TadA* monomer
DNA sequence
(SEQ ID NO: 72)
TCTGAGGTGGAGTTTTCCCACGAGTACTGGATGAGACATGCCCTGACCCT
GGCCAAGAGGGCACGGGATGAGAGGGAGGTGCCTGTGGGAGCCGTGCTGG
TGCTGAACAATAGAGTGATCGGCGAGGGCTGGAACAGAGCCATCGGCCTG
CACGACCCAACAGCCCATGCCGAAATTATGGCCCTGAGACAGGGCGGCCT
GGTCATGCAGAACTACAGACTGATTGACGCCACCCTGTACGTGACATTCG
AGCCTTGCGTGATGTGCGCCGGCGCCATGATCCACTCTAGGATCGGCCGC
GTGGTGTTTGGCGTGAGGAACTCAAAAAGAGGCGCCGCAGGCTCCCTGAT
GAACGTGCTGAACTACCCCGGCATGAATCACCGCGTCGAAATTACCGAGG
GAATCCTGGCAGATGAATGTGCCGCCCTGCTGTGCGATTTCTATCGGATG
CCTAGACAGGTGTTCAATGCTCAGAAGAAGGCCCAGAGCTCCATCAAC
ABE8 TadA* monomer
Amino Acid Sequence
(SEQ ID NO: 73)
SEVEFSHEYWMRHALTLAKRARDEREVPVGAVLVLNNRVIGEGWNRAIGL
HDPTAHAEIMALRQGGLVMQNYRLIDATLYVTFEPCVMCAGAMIHSRIGR
VVFGVRNSKRGAAGSLMNVLNYPGMNHRVEITEGILADECAALLCDFYRM
PRQVFNAQKKAQSSIN

[0257] In other aspects, the disclosure provides adenine base editors with broadened target sequence compatibility. In general, native ecTadA deaminates the adenine in the sequence UAC (e.g., the target sequence) of the anticodon loop of tRNA^{Arg}. Without wishing to be bound by any particular theory, in order to expand the utility of ABEs comprising one or more ecTadA deaminases, such as any of the adenosine deaminases provided herein, the adenosine deaminase proteins were optimized to recognize a wide variety of target sequences within the protospacer sequence without compromising the editing efficiency of the adenosine nucleobase editor complex. In some embodiments, the target sequence is an A in the center of a 5′-NAN-3′ sequence, wherein N is T, C, G, or A. In some embodiments, the target sequence comprises 5′-TAC-3′. In some embodiments, the target sequence comprises 5′-GAA-3′.

[0258] Any two or more of the adenosine deaminases described herein may be connected to one another (e.g., by a linker) within an adenosine deaminase domain of the base editors provided herein. For instance, the base editors provided herein may contain only two adenosine deaminases. In some embodiments, the adenosine deaminases are the same. In some embodiments, the adenosine deaminases are any of the adenosine deaminases provided herein. In some embodiments, the adenosine deaminases are different. In some embodiments, the first adenosine deaminase is any of the adenosine deaminases provided herein, and the second adenosine is any of the adenosine deaminases provided herein but is not identical to the first adenosine deaminase. In some embodiments, the base editor comprises two adenosine deaminases (e.g., a first adenosine deaminase and a second adenosine deaminase). In some embodiments, the base editor comprises a first adenosine deaminase and a second adenosine deaminase. In some embodiments, the first adenosine deaminase is N-terminal to the second adenosine deaminase in the base editor. In some embodiments, the first adenosine deaminase is C-terminal to the second adenosine deaminase in the base editor. In some embodiments, the first adenosine deaminase and the second deaminase are fused directly or via a linker.

[0259] In some embodiments, the adenosine deaminase comprises an amino acid sequence that is at least 60%, at least 65%, at least 70%, at least 75%, at least 80%, at least 85%, at least 90%, at least 95%, at least 96%, at least 97%, at least 98%, at least 99%, or at least 99.5% identical to any one of the amino acid sequences set forth in any one of SEQ ID NOs: 1-10, or to any of the adenosine deaminases provided herein. In certain embodiments, the adenosine deaminase comprises an amino acid sequence that is at least 80%, at least 85%, at least 90%, at least 95%, at least 96%, at least 97%, at least 98%, at least 99%, or at least 99.5% identical to the amino acid sequence of TadA7.10 (SEQ ID NO: 61). It should be appreciated that adenosine deaminases provided herein may include one or more mutations (e.g., any of the mutations provided herein). The disclosure provides adenosine deaminase domains with a certain percent identity plus any of the mutations or combinations thereof described herein. In some embodiments, the adenosine deaminase comprises an amino acid sequence that has 1, 2, 3, 4, 5, 6, 7, 8, 9, 10, 11, 12, 13, 14, 15, 16, 17, 18, 19, 20, 21, 22, 21, 24, 25, 26, 27, 28, 29, 30, 31, 32, 33, 34, 35, 36, 37, 38, 39, 40, 41, 42, 43, 44, 45, 46, 47, 48, 49, 50, or more mutations compared to any one of the amino acid sequences set forth in SEQ ID NOs: 1-10, or any of the adenosine deaminases provided herein. In some embodiments, the adenosine deaminase comprises an amino acid sequence that has at least 5, at least 10, at least 15, at least 20, at least 25, at least 30, at least 35, at least 40, at least 45, at least 50, at least 60, at least 70, at least 80, at least 90, at least 100, at least 110, at least 120, at least 130, at least 140, at least 150, at least 160, or at least 170 identical contiguous amino acid residues as compared to any one of the amino acid sequences set forth in SEQ ID NOs: 1-10, or any of the adenosine deaminases provided herein.

[0260] In some embodiments, the adenosine deaminase comprises a D108X mutation in ecTadA SEQ ID NO: 1, or a corresponding mutation in another adenosine deaminase (e.g., SEQ ID NO: 2-10), where X indicates any amino acid other than the corresponding amino acid in the wild-type adenosine deaminase. In some embodiments, the adenosine deaminase comprises a D108G, D108N, D108V, D108A, or D108Y mutation in SEQ ID NO: 1, or a corresponding mutation in another adenosine deaminase (e.g., SEQ ID NO: 2-10). In some embodiments, the adenosine deaminase comprises a D108N mutation in SEQ ID NO: 1, or a corresponding mutation in another adenosine deaminase (e.g., SEQ ID NO: 2-10). It should be appreciated, however, that additional deaminases may similarly be aligned to identify homologous amino acid residues that can be mutated as provided herein.

[0261] In some embodiments, the adenosine deaminase comprises an A106X mutation in ecTadA SEQ ID NO: 1, or a corresponding mutation in another adenosine deaminase (e.g., SEQ ID NO: 2-10), where X indicates any amino acid other than the corresponding amino acid in the wild-type adenosine deaminase. In some embodiments, the adenosine deaminase comprises an A106V mutation in SEQ ID NO: 1, or a corresponding mutation in another

[0262] In some embodiments, the adenosine deaminase comprises a E155X mutation in SEQ ID NO: 1, or a corresponding mutation in another adenosine deaminase (e.g., SEQ ID NO: 2-10), where the presence of X indicates any amino acid other than the corresponding amino acid in the wild-type adenosine deaminase. In some embodiments, the adenosine deaminase comprises a E155D, E155G, or E155V mutation in SEQ ID NO: 1, or a corresponding mutation in another adenosine deaminase (e.g., SEQ ID NO: 2-10). In some embodiments, the adenosine deaminase comprises a E155V mutation in SEQ ID NO: 1, or a corresponding mutation in another adenosine deaminase (e.g., SEQ ID NO: 2-10).

[0263] In some embodiments, the adenosine deaminase comprises a D147X mutation in SEQ ID NO: 1, or a corresponding mutation in another adenosine deaminase (e.g., SEQ ID NO: 2-10), where the presence of X indicates any amino acid other than the corresponding amino acid in the wild-type adenosine deaminase. In some embodiments, the adenosine deaminase comprises a D147Y mutation in SEQ ID NO: 1, or a corresponding mutation in another adenosine deaminase (e.g., SEQ ID NO: 2-10).

[0264] It should be appreciated that any of the mutations provided herein (e.g., based on the ecTadA amino acid sequence of SEQ ID NO: 1) may be introduced into other adenosine deaminases, such as S. aureus TadA (saTadA), or other adenosine deaminases (e.g., bacterial adenosine deaminases). It would be apparent to the skilled artisan how to identify amino acid residues from other adenosine deaminases that are homologous to the mutated residues in ecTadA. Thus, any of the mutations identified in ecTadA may be made in other adenosine deaminases that have homologous amino acid residues. It should also be appreciated that any of the mutations provided herein may be made individually or in any combination in ecTadA or another adenosine deaminase (e.g., SEQ ID NO: 2-10). For example, an adenosine deaminase may contain a D108N, a A106V, a E155V, and/or a D147Y mutation in ecTadA SEQ ID NO: 1, or a corresponding mutation in another adenosine deaminase (e.g., SEQ ID NO: 2-10). In some embodiments, an adenosine deaminase comprises the following group of mutations (groups of mutations are separated by a “;”) in ecTadA SEQ ID NO: 1, or corresponding mutations in another adenosine deaminase (e.g., SEQ ID NO: 2-10): D108N and A106V; D108N and E155V; D108N and D147Y; A106V and E155V; A106V and D147Y; E155V and D147Y; D108N, A106V, and E55V; D108N, A106V, and D147Y; D108N, E55V, and D147Y; A106V, E55V, and D147Y; and D108N, A106V, E55V, and D147Y. It should be appreciated, however, that any combination of corresponding mutations provided herein may be made in an adenosine deaminase (e.g., ecTadA). In some embodiments, an adenosine deaminase comprises one or more of the mutations provided herein, which identifies individual mutations and combinations of mutations made in ecTadA. In some embodiments, an adenosine deaminase comprises any mutation or combination of mutations provided herein.

[0265] In some embodiments, the adenosine deaminase comprises an L84X mutation in ecTadA SEQ ID NO: 1, or a corresponding mutation in another adenosine deaminase (e.g., SEQ ID NO: 2-10), where X indicates any amino acid other than the corresponding amino acid in the wild-type adenosine deaminase. In some embodiments, the adenosine deaminase comprises an L84F mutation in SEQ ID NO: 1, or a corresponding mutation in another adenosine deaminase (e.g., SEQ ID NO: 2-10).

[0266] In some embodiments, the adenosine deaminase comprises an H123X mutation in ecTadA SEQ ID NO: 1, or a corresponding mutation in another adenosine deaminase (e.g., SEQ ID NO: 2-10), where X indicates any amino acid other than the corresponding amino acid in the wild-type adenosine deaminase. In some embodiments, the adenosine deaminase comprises an H123Y mutation in SEQ ID NO: 1, or a corresponding mutation in another adenosine deaminase (e.g., SEQ ID NO: 2-10).

[0267] In some embodiments, the adenosine deaminase comprises an I156X mutation in ecTadA SEQ ID NO: 1, or a corresponding mutation in another adenosine deaminase (e.g., SEQ ID NO: 2-10), where X indicates any amino acid other than the corresponding amino acid in the wild-type adenosine deaminase. In some embodiments, the adenosine deaminase comprises an I156F mutation in SEQ ID NO: 1, or a corresponding mutation in another adenosine deaminase (e.g., SEQ ID NO: 2-10).

[0268] In some embodiments, the adenosine deaminase comprises one, two, three, four, five, six, or seven mutations selected from the group consisting of L84X, A106X, D108X, H123X, D147X, E155X, and I156X in SEQ ID NO: 1, or a corresponding mutation or mutations in another adenosine deaminase (e.g., SEQ ID NO: 2-10), where X indicates the presence of any amino acid other than the corresponding amino acid in the wild-type adenosine deaminase.

[0269] In some embodiments, the adenosine deaminase comprises one, two, three, four, five, six, or seven mutations selected from the group consisting of L84F, A106V, D108N, H123Y, D147Y, E155V, and I156F in SEQ ID NO: 1, or a corresponding mutation or mutations in another adenosine deaminase (e.g., SEQ ID NO: 2-10). In some embodiments, the adenosine deaminase comprises one, two, three, four, five, or six mutations selected from the group consisting of S2A, I49F, A106V, D108N, D147Y, and E155V in SEQ ID NO: 1, or a corresponding mutation or mutations in another adenosine deaminase (e.g., SEQ ID NO: 2-10). In some embodiments, the adenosine deaminase comprises one, two, three, four, or five, mutations selected from the group consisting of H8Y, A106T, D108N, N127S, and K1605 in SEQ ID NO: 1, or a corresponding mutation or mutations in another adenosine deaminase (e.g., SEQ ID NO: 2-10).

[0270] In some embodiments, the adenosine deaminase comprises an A142X mutation in ecTadA SEQ ID NO: 1, or a corresponding mutation in another adenosine deaminase (e.g., SEQ ID NO: 2-10), where X indicates any amino acid other than the corresponding amino acid in the wild-type adenosine deaminase. In some embodiments, the adenosine deaminase comprises an A142N, A142D, A142G, mutation in SEQ ID NO: 1, or a corresponding mutation in another adenosine deaminase (e.g., SEQ ID NO: 2-10). In some embodiments, the adenosine deaminase comprises an A142N mutation in SEQ ID NO: 1, or a corresponding mutation in another adenosine deaminase (e.g., SEQ ID NO: 2-10).

[0271] In some embodiments, the adenosine deaminase comprises an H36X mutation in ecTadA SEQ ID NO: 1, or a corresponding mutation in another adenosine deaminase (e.g., SEQ ID NO: 2-10), where X indicates any amino acid other than the corresponding amino acid in the wild-type adenosine deaminase. In some embodiments, the adenosine deaminase comprises an H36L mutation in SEQ ID NO: 1, or a corresponding mutation in another adenosine deaminase (e.g., SEQ ID NO: 2-10).

[0272] In some embodiments, the adenosine deaminase comprises an N37X mutation in ecTadA SEQ ID NO: 1, or a corresponding mutation in another adenosine deaminase (e.g., SEQ ID NO: 2-10), where X indicates any amino acid other than the corresponding amino acid in the wild-type adenosine deaminase. In some embodiments, the adenosine deaminase comprises an N37T, or N37S mutation in SEQ ID NO: 1, or a corresponding mutation in another adenosine deaminase (e.g., SEQ ID NO: 2-10). In some embodiments, the adenosine deaminase comprises a N37S mutation in SEQ ID NO: 1, or a corresponding mutation in another adenosine deaminase (e.g., SEQ ID NO: 2-10).

[0273] In some embodiments, the adenosine deaminase comprises a P48X mutation in ecTadA SEQ ID NO: 1, or a corresponding mutation in another adenosine deaminase (e.g., SEQ ID NO: 2-10), where X indicates any amino acid other than the corresponding amino acid in the wild-type adenosine deaminase. In some embodiments, the adenosine deaminase comprises a P48T, P48S, P48A, or P48L mutation in SEQ ID NO: 1, or a corresponding mutation in another adenosine deaminase (e.g., SEQ ID NO: 2-10). In some embodiments, the adenosine deaminase comprises a P48T mutation in SEQ ID NO: 1, or a corresponding mutation in another adenosine deaminase (e.g., SEQ ID NO: 2-10). In some embodiments, the adenosine deaminase comprises a P48S mutation in SEQ ID NO: 1, or a corresponding mutation in another adenosine deaminase (e.g., SEQ ID NO: 2-10). In some embodiments, the adenosine deaminase comprises a P48A mutation in SEQ ID NO: 1, or a corresponding mutation in another adenosine deaminase (e.g., SEQ ID NO: 2-10).

[0274] In some embodiments, the adenosine deaminase comprises an R51X mutation in ecTadA SEQ ID NO: 1, or a corresponding mutation in another adenosine deaminase (e.g., SEQ ID NO: 2-10), where X indicates any amino acid other than the corresponding amino acid in the wild-type adenosine deaminase. In some embodiments, the adenosine deaminase comprises an R51H, or R51L mutation in SEQ ID NO: 1, or a corresponding mutation in another adenosine deaminase (e.g., SEQ ID NO: 2-10). In some embodiments, the adenosine deaminase comprises a R51L mutation in SEQ ID NO: 1, or a corresponding mutation in another adenosine deaminase (e.g., SEQ ID NO: 2-10).

[0275] In some embodiments, the adenosine deaminase comprises an S146X mutation in ecTadA SEQ ID NO: 1, or a corresponding mutation in another adenosine deaminase (e.g., SEQ ID NO: 2-10), where X indicates any amino acid other than the corresponding amino acid in the wild-type adenosine deaminase. In some embodiments, the adenosine deaminase comprises an S146R, or S146C mutation in SEQ ID NO: 1, or a corresponding mutation in another adenosine deaminase (e.g., SEQ ID NO: 2-10). In some embodiments, the adenosine deaminase comprises a S146C mutation in SEQ ID NO: 1, or a corresponding mutation in another adenosine deaminase (e.g., SEQ ID NO: 2-10).

[0276] In some embodiments, the adenosine deaminase comprises a K157X mutation in ecTadA SEQ ID NO: 1, or a corresponding mutation in another adenosine deaminase (e.g., SEQ ID NO: 2-10), where X indicates any amino acid other than the corresponding amino acid in the wild-type adenosine deaminase. In some embodiments, the adenosine deaminase comprises a K157N mutation in SEQ ID NO: 1, or a corresponding mutation in another adenosine deaminase (e.g., SEQ ID NO: 2-10).

[0277] In some embodiments, the adenosine deaminase comprises a W23X mutation in ecTadA SEQ ID NO: 1, or a corresponding mutation in another adenosine deaminase (e.g., SEQ ID NO: 2-10), where X indicates any amino acid other than the corresponding amino acid in the wild-type adenosine deaminase. In some embodiments, the adenosine deaminase comprises a W23R, or W23L mutation in SEQ ID NO: 1, or a corresponding mutation in another adenosine deaminase (e.g., SEQ ID NO: 2-10). In some embodiments, the adenosine deaminase comprises a W23R mutation in SEQ ID NO: 1, or a corresponding mutation in another adenosine deaminase (e.g., SEQ ID NO: 2-10). In some embodiments, the adenosine deaminase comprises a W23L mutation in SEQ ID NO: 1, or a corresponding mutation in another adenosine deaminase (e.g., SEQ ID NO: 2-10).

[0278] In some embodiments, the adenosine deaminase comprises an R152X mutation in ecTadA SEQ ID NO: 1, or a corresponding mutation in another adenosine deaminase (e.g., SEQ ID NO: 2-10), where X indicates any amino acid other than the corresponding amino acid in the wild-type adenosine deaminase. In some embodiments, the adenosine deaminase comprises a R152P, or R52H mutation in SEQ ID NO: 1, or a corresponding mutation in another adenosine deaminase (e.g., SEQ ID NO: 2-10). In some embodiments, the adenosine deaminase comprises a R152P mutation in SEQ ID NO: 1, or a corresponding mutation in another adenosine deaminase (e.g., SEQ ID NO: 2-10). In some embodiments, the adenosine deaminase comprises a R152H mutation in SEQ ID NO: 1, or a corresponding mutation in another adenosine deaminase (e.g., SEQ ID NO: 2-10).

[0279] In some embodiments, the adenosine deaminase comprises an R26X mutation in ecTadA SEQ ID NO: 1, or a corresponding mutation in another adenosine deaminase (e.g., SEQ ID NO: 2-10), where X indicates any amino acid other than the corresponding amino acid in the wild-type adenosine deaminase. In some embodiments, the adenosine deaminase comprises a R26G mutation in SEQ ID NO: 1, or a corresponding mutation in another adenosine deaminase (e.g., SEQ ID NO: 2-10).

[0280] In some embodiments, the adenosine deaminase comprises an I49X mutation in ecTadA SEQ ID NO: 1, or a corresponding mutation in another adenosine deaminase (e.g., SEQ ID NO: 2-10), where X indicates any amino acid other than the corresponding amino acid in the wild-type adenosine deaminase. In some embodiments, the adenosine deaminase comprises an I49V mutation in SEQ ID NO: 1, or a corresponding mutation in another adenosine deaminase (e.g., SEQ ID NO: 2-10).

[0281] In some embodiments, the adenosine deaminase comprises an N72X mutation in ecTadA SEQ ID NO: 1, or a corresponding mutation in another adenosine deaminase (e.g., SEQ ID NO: 2-10), where X indicates any amino acid other than the corresponding amino acid in the wild-type adenosine deaminase. In some embodiments, the adenosine deaminase comprises a N72D mutation in SEQ ID NO: 1, or a corresponding mutation in another

[0282] In some embodiments, the adenosine deaminase comprises an S97X mutation in ecTadA SEQ ID NO: 1, or a corresponding mutation in another adenosine deaminase (e.g., SEQ ID NO: 2-10), where X indicates any amino acid other than the corresponding amino acid in the wild-type adenosine deaminase. In some embodiments, the adenosine deaminase comprises a S97C mutation in SEQ ID NO: 1, or a corresponding mutation in another adenosine deaminase (e.g., SEQ ID NO: 2-10).

[0283] In some embodiments, the adenosine deaminase comprises a G125X mutation in ecTadA SEQ ID NO: 1, or a corresponding mutation in another adenosine deaminase (e.g., SEQ ID NO: 2-10), where X indicates any amino acid other than the corresponding amino acid in the wild-type adenosine deaminase. In some embodiments, the adenosine deaminase comprises a G125A mutation in SEQ ID NO: 1, or a corresponding mutation in another adenosine deaminase (e.g., SEQ ID NO: 2-10).

[0284] In some embodiments, the adenosine deaminase comprises a K161X mutation in ecTadA SEQ ID NO: 1, or a corresponding mutation in another adenosine deaminase (e.g., SEQ ID NO: 2-10), where X indicates any amino acid other than the corresponding amino acid in the wild-type adenosine deaminase. In some embodiments, the adenosine deaminase comprises a K161T mutation in SEQ ID NO: 1, or a corresponding mutation in another adenosine deaminase (e.g., SEQ ID NO: 2-10).

[0285] In some embodiments, the adenosine deaminase comprises one or more of a W23X, H36X, N37X, P48X, I49X, R51X, N72X, L84X, S97X, A106X, D108X, H123X, G125X, A142X, S146X, D147X, R152X, E155X, I156X, K157X, and/or K161X mutation in SEQ ID NO: 1, or one or more corresponding mutations in another adenosine deaminase (e.g., SEQ ID NO: 2-10), where the presence of X indicates any amino acid other than the corresponding amino acid in the wild-type adenosine deaminase. In some embodiments, the adenosine deaminase comprises one or more of W23L, W23R, H36L, P48S, P48A, R51L, L84F, A106V, D108N, H123Y, A142N, S146C, D147Y, R152P, E155V, I156F, and/or K157N mutation in SEQ ID NO: 1, or one or more corresponding mutations in another adenosine deaminase (e.g., SEQ ID NO: 2-10). In some embodiments, the adenosine deaminase comprises one or more of the mutations provided herein corresponding to SEQ ID NO: 1, or one or more corresponding mutations in another adenosine deaminase (e.g., SEQ ID NO: 2-10).

[0286] In some embodiments, the adenosine deaminase comprises or consists of one or two mutations selected from A106X and D108X in SEQ ID NO: 1, or a corresponding mutation or mutations in another adenosine deaminase (e.g., SEQ ID NO: 2-10), where X indicates the presence of any amino acid other than the corresponding amino acid in the wild-type adenosine deaminase. In some embodiments, the adenosine deaminase comprises or consists of one or two mutations selected from A106V and D108N in SEQ ID NO: 1, or a corresponding mutation or mutations in another adenosine deaminase (e.g., SEQ ID NO: 2-10).

[0287] In some embodiments, the adenosine deaminase comprises or consists of one, two, three, or four mutations selected from A106X, D108X, D147X, and E155X in SEQ ID NO: 1, or a corresponding mutation or mutations in another adenosine deaminase (e.g., SEQ ID NO: 2-10), where X indicates the presence of any amino acid other than the corresponding amino acid in the wild-type adenosine deaminase. In some embodiments, the adenosine deaminase comprises or consists of one, two, three, or four mutations selected from A106V, D108N, D147Y, and E155V in SEQ ID NO: 1, or a corresponding mutation or mutations in another adenosine deaminase (e.g., SEQ ID NO: 2-10). In some embodiments, the adenosine deaminase comprises or consists of an A106V, D108N, D147Y, and E155V mutation in SEQ ID NO: 1, or corresponding mutations in another adenosine deaminase (e.g., SEQ ID NO: 2-10).

[0288] In some embodiments, the adenosine deaminase comprises or consists of one, two, three, four, five, six, or seven mutations selected from L84X, A106X, D108X, H123X, D147X, E155X, and I156X in SEQ ID NO: 1, or a corresponding mutation or mutations in another adenosine deaminase (e.g., SEQ ID NO: 2-10), where X indicates the presence of any amino acid other than the corresponding amino acid in the wild-type adenosine deaminase. In some embodiments, the adenosine deaminase comprises or consists of one, two, three, four, five, six, or seven mutations selected from L84F, A106V, D108N, H123Y, D147Y, E155V, and I156F in SEQ ID NO: 1, or a corresponding mutation or mutations in another adenosine deaminase (e.g., SEQ ID NO: 2-10). In some embodiments, the adenosine deaminase comprises or consists of a L84F, A106V, D108N, H123Y, D147Y, E155V, and I156F mutation in SEQ ID NO: 1, or corresponding mutations in another adenosine deaminase (e.g., SEQ ID NO: 2-10).

[0289] In some embodiments, the adenosine deaminase comprises or consists of one, two, three, four, five, six, seven, eight, nine, ten, or eleven mutations selected from H36X, R51X, L84X, A106X, D108X, H123X, S146X, D147X, E155X, I156X, and K157X in SEQ ID NO: 1, or a corresponding mutation or mutations in another adenosine deaminase (e.g., SEQ ID NO: 2-10), where X indicates the presence of any amino acid other than the corresponding amino acid in the wild-type adenosine deaminase. In some embodiments, the adenosine deaminase comprises or consists of one, two, three, four, five, six, seven, eight, nine, ten, or eleven mutations selected from H36L, R51L, L84F, A106V, D108N, H123Y, S146C, D147Y, E155V, I156F, and K157N in SEQ ID NO: 1, or a corresponding mutation or mutations in another adenosine deaminase (e.g., SEQ ID NO: 2-10). In some embodiments, the adenosine deaminase comprises or consists of a H36L, R51L, L84F, A106V, D108N, H123Y, S146C, D147Y, E155V, I156F, and K157N mutation in SEQ ID NO: 1, or corresponding mutations in another adenosine deaminase (e.g., SEQ ID NO: 2-10).

[0290] In some embodiments, the adenosine deaminase comprises or consists of one, two, three, four, five, six, seven, eight, nine, ten, eleven, or twelve mutations selected from H36X, P48X, R51X, L84X, A106X, D108X, H123X, S146X, D147X, E155X, I156X, and K157X in SEQ ID NO: 1, or a corresponding mutation or mutations in another adenosine deaminase (e.g., SEQ ID NO: 2-10), where X indicates the presence of any amino acid other than the corresponding amino acid in the wild-type adenosine deaminase. In some embodiments, the adenosine deaminase comprises or consists of one, two, three, four, five, six, seven, eight, nine, ten, eleven, or twelve mutations selected from H36L, P48S, R51L, L84F, A106V, D108N, H123Y, S146C, D147Y, E155V, I156F, and K157N in SEQ ID NO: 1, or a corresponding mutation or mutations in another adenosine deaminase (e.g., SEQ ID NO: 2-10). In some embodiments, the adenosine deaminase comprises or consists of a H36L, P48S, R51L, L84F, A106V, D108N, H123Y, S146C, D147Y, E155V, I156F, and K157N mutation in SEQ ID NO: 1, or corresponding mutations in another adenosine deaminase (e.g., SEQ ID NO: 2-10).

[0291] In some embodiments, the adenosine deaminase comprises or consists of one, two, three, four, five, six, seven, eight, nine, ten, eleven, twelve, or thirteen mutations selected from H36X, P48X, R51X, L84X, A106X, D108X, H123X, A142X, S146X, D147X, E155X, I156X, and K157X in SEQ ID NO: 1, or a corresponding mutation or mutations in another adenosine deaminase (e.g., SEQ ID NO: 2-10), where X indicates the presence of any amino acid other than the corresponding amino acid in the wild-type adenosine deaminase. In some embodiments, the adenosine deaminase comprises or consists of one, two, three, four, five, six, seven, eight, nine, ten, eleven, twelve, or thirteen mutations selected from H36L, P48S, R51L, L84F, A106V, D108N, H123Y, A142N, S146C, D147Y, E155V, I156F, and K157N in SEQ ID NO: 1, or a corresponding mutation or mutations in another adenosine deaminase (e.g., SEQ ID NO: 2-10). In some embodiments, the adenosine deaminase comprises or consists of a H36L, P48S, R51L, L84F, A106V, D108N, H123Y, A142N, S146C, D147Y, E155V, I156F, and K157N mutation in SEQ ID NO: 1, or corresponding mutations in another adenosine deaminase (e.g., SEQ ID NO: 2-10).

[0292] In some embodiments, the adenosine deaminase comprises or consists of one, two, three, four, five, six, seven, eight, nine, ten, eleven, twelve, thirteen, or fourteen mutations selected from W23X, H36X, P48X, R51X, L84X, A106X, D108X, H123X, A142X, S146X, D147X, E155X, I156X, and K157X in SEQ ID NO: 1, or a corresponding mutation or mutations in another adenosine deaminase (e.g., SEQ ID NO: 2-10), where X indicates the presence of any amino acid other than the corresponding amino acid in the wild-type adenosine deaminase. In some embodiments, the adenosine deaminase comprises or consists of one, two, three, four, five, six, seven, eight, nine, ten, eleven, twelve, thirteen, or fourteen mutations selected from W23L, H36L, P48A, R51L, L84F, A106V, D108N, H123Y, A142N, S146C, D147Y, E155V, I156F, and K157N in SEQ ID NO: 1, or a corresponding mutation or mutations in another adenosine deaminase (e.g., SEQ ID NO: 2-10). In some embodiments, the adenosine deaminase comprises or consists of a W23L, H36L, P48A, R51L, L84F, A106V, D108N, H123Y, A142N, S146C, D147Y, E155V, I156F, and K157N mutation in SEQ ID NO: 1, or corresponding mutations in another adenosine deaminase (e.g., SEQ ID NO: 2-10).

[0293] In some embodiments, the adenosine deaminase comprises or consists of one, two, three, four, five, six, seven, eight, nine, ten, eleven, twelve, thirteen, or fourteen mutations selected from W23X, H36X, P48X, R51X, L84X, A106X, D108X, H123X, S146X, D147X, R152X, E155X, I156X, and K157X in SEQ ID NO: 1, or a corresponding mutation or mutations in another adenosine deaminase (e.g., SEQ ID NO: 2-10), where X indicates the presence of any amino acid other than the corresponding amino acid in the wild-type adenosine deaminase. In some embodiments, the adenosine deaminase comprises or consists of one, two, three, four, five, six, seven, eight, nine, ten, eleven, twelve, thirteen, or fourteen mutations selected from W23R, H36L, P48A, R51L, L84F, A106V, D108N, H123Y, S146C, D147Y, R152P, E155V, I156F, and K157N in SEQ ID NO: 1, or a corresponding mutation or mutations in another adenosine deaminase (e.g., SEQ ID NO: 2-10). In some embodiments, the adenosine deaminase comprises or consists of a W23R, H36L, P48A, R51L, L84F, A106V, D108N, H123Y, S146C, D147Y, R152P, E155V, I156F, and K157N mutation in SEQ ID NO: 1, or corresponding mutations in another adenosine deaminase (e.g., SEQ ID NO: 2-10).

[0294] In some embodiments, the adenosine deaminase comprises or consists of one, two, three, four, five, six, seven, eight, nine, ten, eleven, twelve, thirteen, fourteen, or fifteen mutations selected from W23X, H36X, P48X, R51X, L84X, A106X, D108X, H123X, A142X, S146X, D147X, R152X, E155X, I156X, and K157X in SEQ ID NO: 1, or a corresponding mutation or mutations in another adenosine deaminase (e.g., SEQ ID NO: 2-10), where X indicates the presence of any amino acid other than the corresponding amino acid in the wild-type adenosine deaminase. In some embodiments, the adenosine deaminase comprises or consists of one, two, three, four, five, six, seven, eight, nine, ten, eleven, twelve, thirteen, fourteen, or fifteen mutations selected from W23L, H36L, P48A, R51L, L84F, A106V, D108N, H123Y, A142N, S146C, D147Y, R152P, E155V, I156F, and K157N in SEQ ID NO: 1, or a corresponding mutation or mutations in another adenosine deaminase (e.g., SEQ ID NO: 2-10). In some embodiments, the adenosine deaminase comprises or consists of a W23L, H36L, P48A, R51L, L84F, A106V, D108N, H123Y, A142N, S146C, D147Y, R152P, E155V, I156F, and K157N mutation in SEQ ID NO: 1, or corresponding mutations in another adenosine deaminase (e.g., SEQ ID NO: 2-10).

[0295] In some embodiments, the adenosine deaminase comprises one or more of the mutations provided herein corresponding to SEQ ID NO: 1, or one or more of the corresponding mutations in another deaminase. In some embodiments, the adenosine deaminase comprises or consists of a variant of SEQ ID NO: 1 provided herein, or the corresponding variant in another adenosine deaminase.

[0296] It should be appreciated that the adenosine deaminase (e.g., a first or second adenosine deaminase) may comprise one or more of the mutations provided in any of the adenosine deaminases (e.g., ecTadA adenosine deaminases) provided herein. In some embodiments, the adenosine deaminase comprises the combination of mutations of any of the adenosine deaminases (e.g., ecTadA adenosine deaminases) provided herein. For example, the adenosine deaminase may comprise the mutations W23R, H36L, P48A, R51L, L84F, A106V, D108N, H123Y, S146C, D147Y, R152P, E155V, I156F, and K157N (relative to SEQ ID NO: 1), which is shown as ABE7.10 provided herein. In some embodiments, the adenosine deaminase may comprise the mutations H36L, R51L, L84F, A106V, D108N, H123Y, S146C, D147Y, E155V, I156F, and K157N (relative to SEQ ID NO: 1). In some embodiments, the adenosine deaminase comprises any of the following combination of mutations relative to SEQ ID NO:1, where each mutation of a combination is separated by a “_” and each combination of mutations is between parentheses: (A106V_D108N), (R107C_D108N), (H8Y_D108N_S127S_D147Y_Q154H), (H8Y_R24W_D108N_N127S_D147Y_E155V), (D108N_D147Y_E155V), (H8Y_D108N_S127S), (H8Y_D108N_N127S_D147Y_Q154H), (A106V_D108N_D147Y_E155V), (D108Q_D147Y_E155V), (D108M_D147Y_E155V), (D108L_D147Y_E155V), (D108K_D147Y_E155V), (D108I_D147Y_E155V), (D108F_D147Y_E155V), (A106V_D108N_D147Y), (A106V_D108M_D147Y_E155V), (E59A_A106V_D108N_D147Y_E155V), (E59A cat dead_A106V_D108N_D147Y_E155V), (L84F_A106V_D108N_H123Y_D147Y_E155V_I156Y), (L84F_A106V_D108N_H123Y_D147Y_E155V_I156F), (D103A_D014N), (G22P_D103A_D104N), (G22P_D103A_D104N_S138A), (D103A_D104N_S138A), (R26G_L84F_A106V_R107H_D108N_H123Y_A142N_A143D_D147Y_E155V_I156F), (E25G_R26G_L84F_A106V_R107H_D108N_H123Y_A142N_A143D_D147Y_E155V_I15 6F), (E25D_R26G_L84F_A106V_R107K_D108N_H123Y_A142N_A143G_D147Y_E155V_I15 6F), (R26Q_L84F_A106V_D108N_H123Y_A142N_D147Y_E155V_I156F), (E25M_R26G_L84F_A106V_R107P_D108N_H123Y_A142N_A143D_D147Y_E155V_I15 6F), (R26C_L84F_A106V_R107H_D108N_H123Y_A142N_D147Y_E155V_I156F), (L84F_A106V_D108N_H123Y_A142N_A143L_D147Y_E155V_I156F), (R26G_L84F_A106V_D108N_H123Y_A142N_D147Y_E155V_I156F), (E25A_R26G_L84F_A106V_R107N_D108N_H123Y_A142N_A143E_D147Y_E155V_I15 6F), (R26G_L84F_A106V_R107H_D108N_H123Y_A142N_A143D_D147Y_E155V_I156F), (A106V_D108N_A142N_D147Y_E155V), (R26G_A106V_D108N_A142N_D147Y_E155V), (E25D_R26G_A106V_R107K_D108N_A142N_A143G_D147Y_E155V), (R26G_A106V_D108N_R107H_A142N_A143D_D147Y_E155V), (E25D_R26G_A106V_D108N_A142N_D147Y_E155V), (A106V_R107K_D108N_A142N_D147Y_E155V), (A106V_D108N_A142N_A143G_D147Y_E155V), (A106V_D108N_A142N_A143L_D147Y_E155V), (H36L_R51L_L84F_A106V_D108N_H123Y_S146C_D147Y_E155V_I156F_K157N), (H36L_P48S_R51L_L84F_A106V_D108N_H123Y_S146C_D147Y_E155V_I156F_K157N), (H36L_P48S_R51L_L84F_A106V_D108N_H123Y_A142N_S146C_D147Y_E155V_I156F K157N), (W23L_H36L_P48A_R51L_L84F_A106V_D108N_H123Y_A142N_S146C_D147Y_E155 V_I156F_K157N), (W23L_H36L_P48A_R51L_L84F_A106V_D108N_H123Y_A142N_S146C_D147Y_R152P E155V_I156F_K157N), (N37T_P48T_M70L_L84F_A106V_D108N_H123Y_D147Y_I49V_E155V_I156F), (N37S_L84F_A106V_D108N_H123Y_D147Y_E155V_I156F_K161T), (H36L_L84F_A106V_D108N_H123Y_D147Y_Q154H_E155V_I156F), (N72S_L84F_A106V_D108N_H123Y_S146R_D147Y_E155V_I156F), (H36L_P48L_L84F_A106V_D108N_H123Y_E134G_D147Y_E155V_I156F), (H36L_L84F_A106V_D108N_H123Y_D147Y_E155V_I156F_K157N), (H36L_L84F_A106V_D108N_H123Y_S146C_D147Y_E155V_I156F), (L84F_A106V_D108N_H123Y_S146R_D147Y_E155V_I156F_K161T), (N37S_R51H_D77G_L84F_A106V_D108N_H123Y_D147Y_E155V_I156F), (R51L_L84F_A106V_D108N_H123Y_D147Y_E155V_I156F_K157N), (D24G_Q71R_L84F_H96L_A106V_D108N_H123Y_D147Y_E155V_I156F_K160E), (H36L_G67V_L84F_A106V_D108N_H123Y_S146T_D147Y_E155V_I156F), (Q71L_L84F_A106V_D108N_H123Y_L137M_A143E_D147Y_E155V_I156F), (E25G_L84F_A106V_D108N_H123Y_D147Y_E155V_I156F_Q159L), (L84F_A91T_F104I_A106V_D108N_H123Y_D147Y_E155V_I156F), (N72D_L84F_A106V_D108N_H123Y_G125A_D147Y_E155V_I156F), (P48S_L84F_S97C_A106V_D108N_H123Y_D147Y_E155V_I156F), (W23G_L84F_A106V_D108N_H123Y_D147Y_E155V_I156F), (D24G_P48L_Q71R_L84F_A106V_D108N_H123Y_D147Y_E155V_I156F_Q159L), (L84F_A106V_D108N_H123Y_A142N_D147Y_E155V_I156F), (H36L_R51L_L84F_A106V_D108N_H123Y_A142N_S146C_D147Y_E155V_I156F K157N), (N37S_L84F_A106V_D108N_H123Y_A142N_D147Y_E155V_I156F_K161T), (L84F_A106V_D108N_D147Y_E155V_I156F), (R51L_L84F_A106V_D108N_H123Y_S146C_D147Y_E155V_I156F_K157N_K161T), (L84F_A106V_D108N_H123Y_S146C_D147Y_E155V_I156F_K161T), (L84F_A106V_D108N_H123Y_S146C_D147Y_E155V_I156F_K157N_K160E_K161T), (L84F_A106V_D108N_H123Y_S146C_D147Y_E155V_I156F_K157N_K160E), (R74Q L84F_A106V_D108N_H123Y_D147Y_E155V_I156F), (R74A_L84F_A106V_D108N_H123Y_D147Y_E155V_I156F), (L84F_A106V_D108N_H123Y_D147Y_E155V_I156F), (R74Q_L84F_A106V_D108N_H123Y_D147Y_E155V_I156F), (L84F_R98Q_A106V_D108N_H123Y_D147Y_E155V_I156F), (L84F_A106V_D108N_H123Y_R129Q_D147Y_E155V_I156F), (P48S_L84F_A106V_D108N_H123Y_A142N_D147Y_E155V_I156F), (P48S_A142N), (P48T_I49V_L84F_A106V_D108N_H123Y_A142N_D147Y_E155V_I156F_L157N), (P48T_I49V_A142N), (H36L_P48S_R51L_L84F_A106V_D108N_H123Y_S146C_D147Y_E155V_I156F K157N), (H36L_P48S_R51L_L84F_A106V_D108N_H123Y_S146C_A142N_D147Y_E155V_I156F K157N), (H36L_P48T_I49V_R51L_L84F_A106V_D108N_H123Y_S146C_D147Y_E155V_I156F K157N), (H36L_P48T_I49V_R51L_L84F_A106V_D108N_H123Y_A142N_S146C_D147Y_E155V I156F_K157N), (H36L_P48A_R51L_L84F_A106V_D108N_H123Y_S146C_D147Y_E155V_I156F K157N), (H36L_P48A_R51L_L84F_A106V_D108N_H123Y_A142N_S146C_D147Y_E155V_I156F K157N), (H36L_P48A_R51L_L84F_A106V_D108N_H123Y_S146C_A142N_D147Y_E155V_I156F K157N), (W23L_H36L_P48A_R51L_L84F_A106V_D108N_H123Y_S146C_D147Y_E155V_I156F K157N), (W23R_H36L_P48A_R51L_L84F_A106V_D108N_H123Y_S146C_D147Y_E155V_I156F K157N), (W23L_H36L_P48A_R51L_L84F_A106V_D108N_H123Y_S146R_D147Y_E155V_I156F K161T), (H36L_P48A_R51L_L84F_A106V_D108N_H123Y_S146C_D147Y_R152H_E155V_I156F_K157N), (H36L_P48A_R51L_L84F_A106V_D108N_H123Y_S146C_D147Y_R152P_E155V_I156F K157N), (W23L_H36L_P48A_R51L_L84F_A106V_D108N_H123Y_S146C_D147Y_R152P_E155V_I156F_K157N), (W23L_H36L_P48A_R51L_L84F_A106V_D108N_H123Y_A142A_S146C_D147Y_E155 V_I156F_K157N), (W23L_H36L_P48A_R51L_L84F_A106V_D108N_H123Y_A142A_S146C_D147Y_R152P E155V_I156F_K157N), (W23L_H36L_P48A_R51L_L84F_A106V_D108N_H123Y_S146R_D147Y_E155V_I156F K161T), (W23R_H36L_P48A_R51L_L84F_A106V_D108N_H123Y_S146C_D147Y_R152P_E155V_I156F_K157N), (H36L_P48A_R51L_L84F_A106V_D108N_H123Y_A142N_S146C_D147Y_R152P_E155 V_I156F_K157N).

[0297] In some embodiments, the adenosine deaminase comprises an amino acid sequence that is at least 60%, 65%, 70%, 75%, 80%, 85%, 90%, 95, 98%, 99%, or 99.5% identical to any one of SEQ ID NOs: 1-10, or any of the adenosine deaminases provided herein. In some embodiments, the adenosine deaminase comprises an amino acid sequence that has 1, 2, 3, 4, 5, 6, 7, 8, 9, 10, 11, 12, 13, 14, 15, 16, 17, 18, 19, 20, 21, 22, 21, 24, 25, 26, 27, 28, 29, 30, 31, 32, 33, 34, 35, 36, 37, 38, 39, 40, 41, 42, 43, 44, 45, 46, 47, 48, 49, 50 or more mutations compared to any one of the amino acid sequences set forth in SEQ ID NOs: 1-10, or any of the adenosine deaminases provided herein. In some embodiments, the adenosine deaminase comprises an amino acid sequence that has at least 5, at least 10, at least 15, at least 20, at least 25, at least 30, at least 35, at least 40, at least 45, at least 50, at least 60, at least 70, at least 80, at least 90, at least 100, at least 110, at least 120, at least 130, at least 140, at least 150, at least 160, or at least 166, identical contiguous amino acid residues as compared to any one of the amino acid sequences set forth in SEQ ID NOs: 1-10, or any of the adenosine deaminases provided herein. In some embodiments, the adenosine deaminase comprises the amino acid sequence of any one of SEQ ID NOs: 1-10, or any of the adenosine deaminases provided herein. In some embodiments, the adenosine deaminase consists of the amino acid sequence of any one of SEQ ID NOs: 1-10, or any of the adenosine deaminases provided herein. The ecTadA sequences provided below are from ecTadA (SEQ ID NO: 1), absent the N-terminal methionine (M). For clarity, the amino acid numbering scheme used to identify the various amino acid mutations is derived from ecTadA (SEQ ID NO: 1) for E. coli TadA.

### Cytidine Deaminases

[0298] In some embodiments, the disclosure provides base editors that comprise one or more cytidine deaminase domains. In some aspects, any of the disclosed base editors are capable of deaminating cytidine in a nucleic acid sequence (e.g., genomic DNA).

[0299] In some embodiments, the cytidine deaminase is an apolipoprotein B mRNA-editing complex (APOBEC) family deaminase. In some embodiments, the cytidine deaminase is an APOBEC1 deaminase, an APOBEC2 deaminase, an APOBEC3A deaminase, an APOBEC3B deaminase, an APOBEC3C deaminase, an APOBEC3D deaminase, an APOBEC3F deaminase, an APOBEC3G deaminase, an APOBEC3H deaminase, or an APOBEC4 deaminase. In some embodiments, the cytidine deaminase is an activation-induced deaminase (AID). In some embodiments, the deaminase is a Lamprey CDA1 (pmCDA1) deaminase. In some embodiments, the cytidine deaminase is from a human, chimpanzee, gorilla, monkey, cow, dog, rat, or mouse. In some embodiments, the deaminase is from a human. In some embodiments the deaminase is from a rat. In some embodiments, the cytidine deaminase is a human APOBEC1 deaminase. In some embodiments, the cytidine deaminase is pmCDA1. In some embodiments, the deaminase is human APOBEC3G. In some embodiments, the deaminase is a human APOBEC3G variant. In some embodiments, the deaminase is at least 80%, at least 85%, at least 90%, at least 92%, at least 95%, at least 96%, at least 97%, at least 98%, at least 99%, or at least 99.5% identical to any one of the APOBEC amino acid sequences set forth herein.

[0300] Some exemplary suitable cytidine deaminases domains that can be fused to Cas9 domains according to aspects of this disclosure are provided below. It should be understood that the Specification also embraces other cytidine deaminases comprising an amino acid sequence having at least 80%, at least 85%, at least 90%, at least 95%, at least 98%, at least 99%, or at least 99.5% sequence identity to one of the following exemplary cytidine deaminases:

Human AID:
(SEQ ID NO: 292)
[sequence omitted]
Mouse AID:
(SEQ ID NO: 293)
MDSLLMKQKKFLYHFKNVRWAKGRHETYLCYVVKRRDSATSCSLDFGHLR
NKSGCHVELLFLRYISDWDLDPGRCYRVTWFTSWSPCYDCARHVAEFLRW
NPNLSLRIFTARLYFCEDRKAEPEGLRRLHRAGVQIGIMTFKDYFYCWNT
FVENRERTFKAWEGLHENSVRLTRQLRRILLPLYEVDDLRDAFRMLGF
Dog AID:
(SEQ ID NO: 294)
MDSLLMKQRKFLYHFKNVRWAKGRHETYLCYVVKRRDSATSFSLDFGHLR
NKSGCHVELLFLRYISDWDLDPGRCYRVTWFTSWSPCYDCARHVADFLRG
YPNLSLRIFAARLYFCEDRKAEPEGLRRLHRAGVQIAIMTFKDYFYCWNT
FVENREKTFKAWEGLHENSVRLSRQLRRILLPLYEVDDLRDAFRTLGL
Bovine AID:
(SEQ ID NO: 295)
MDSLLKKQRQFLYQFKNVRWAKGRHETYLCYVVKRRDSPTSFSLDFGHLR
NKAGCHVELLFLRYISDWDLDPGRCYRVTWFTSWSPCYDCARHVADFLRG
YPNLSLRIFTARLYFCDKERKAEPEGLRRLHRAGVQIAIMTFKDYFYCWN
TFVENHERTFKAWEGLHENSVRLSRQLRRILLPLYEVDDLRDAFRTLGL
Rat: AID:
(SEQ ID NO: 296)
MAVGSKPKAALVGPHWERERIWCFLCSTGLGTQQTGQTSRWLRPAATQDP
VSPPRSLLMKQRKFLYHFKNVRWAKGRHETYLCYVVKRRDSATSFSLDFG
YLRNKSGCHVELLFLRYISDWDLDPGRCYRVTWFTSWSPCYDCARHVADF
LRGNPNLSLRIFTARLTGWGALPAGLMSPARPSDYFYCWNTFVENHERTF
KAWEGLHENSVRLSRRLRRILLPLYEVDDLRDAFRTLGL
Mouse APOBEC-3:
(SEQ ID NO: 297)
MGPFCLGCSHRKCYSPIRNLISQETFKFHFKNLGYAKGRKDTFLCYEVTR
KDCDSPVSLHHGVFKNKDNIHAEICFLYWFHDKVLKVLSPREEFKITWYM
SWSPCFECAEQIVRFLATHHNLSLDIFSSRLYNVQDPETQQNLCRLVQEG
AQVAAMDLYEFKKCWKKFVDNGGRRFRPWKRLLTNFRYQDSKLQEILRPC
YIPVPSSSSSTLSNICLTKGLPETRFCVEGRRMDPLSEEEFYSQFYNQRV
KHLCYYHRMKPYLCYQLEQFNGQAPLKGCLLSEKGKQHAEILFLDKIRSM
ELSQVTITCYLTWSPCPNCAWQLAAFKRDRPDLILHIYTSRLYFHWKRPF
QKGLCSLWQSGILVDVMDLPQFTDCWTNFVNPKRPFWPWKGLEIISRRTQ
RRLRRIKESWGLQDLVNDFGNLQLGPPMS
Rat APOBEC-3:
(SEQ ID NO: 298)
MGPFCLGCSHRKCYSPIRNLISQETFKFHFKNLRYAIDRKDTFLCYEVTR
KDCDSPVSLHHGVFKNKDNIHAEICFLYWFHDKVLKVLSPREEFKITWYM
SWSPCFECAEQVLRFLATHHNLSLDIFSSRLYNIRDPENQQNLCRLVQEG
AQVAAMDLYEFKKCWKKFVDNGGRRFRPWKKLLTNFRYQDSKLQEILRPC
YIPVPSSSSSTLSNICLTKGLPETRFCVERRRVHLLSEEEFYSQFYNQRV
KHLCYYHGVKPYLCYQLEQFNGQAPLKGCLLSEKGKQHAEILFLDKIRSM
ELSQVIITCYLTWSPCPNCAWQLAAFKRDRPDLILHIYTSRLYFHWKRPF
QKGLCSLWQSGILVDVMDLPQFTDCWTNFVNPKRPFWPWKGLEIISRRTQ
RRLHRIKESWGLQDLVNDFGNLQLGPPMS
Rhesus macaque APOBEC-3G:
(SEQ ID NO: 299)
MVEPMDPRTFVSNFNNRPILSGLNTVWLCCEVKTKDPSGPPLDAKIFQGK
VYSKAKYHPEMRFLRWFHKWRQLHHDQEYKVTWYVSWSPCTRCANSVATF
LAKDPKVTLTIFVARLYYFWKPDYQQALRILCQKRGGPHATMKIMNYNEF
QDCWNKFVDGRGKPFKPRNNLPKHYTLLQATLGELLRHLMDPGTFTSNFN
NKPWVSGQHETYLCYKVERLHNDTWVPLNQHRGFLRNQAPNIHGFPKGRH
AELCFLDLIPFWKLDGQQYRVTCFTSWSPCFSCAQEMAKFISNNEHVSLC
IFAARIYDDQGRYQEGLRALHRDGAKIAMMNYSEFEYCWDTFVDRQGRPF
QPWDGLDEHSQALSGRLRAI
Chimpanzee APOBEC-3G:
(SEQ ID NO: 300)
MKPHFRNPVERMYQDTFSDNFYNRPILSHRNTVWLCYEVKTKGPSRPPLD
AKIFRGQVYSKLKYHPEMRFFHWFSKWRKLHRDQEYEVTWYISWSPCTKC
TRDVATFLAEDPKVTLTIFVARLYYFWDPDYQEALRSLCQKRDGPRATMK
IMNYDEFQHCWSKFVYSQRELFEPWNNLPKYYILLHIMLGEILRHSMDPP
TFTSNFNNELWVRGRHETYLCYEVERLHNDTWVLLNQRRGFLCNQAPHKH
GFLEGRHAELCFLDVIPFWKLDLHQDYRVTCFTSWSPCFSCAQEMAKFIS
NNKHVSLCIFAARIYDDQGRCQEGLRTLAKAGAKISIMTYSEFKHCWDTF
VDHQGCPFQPWDGLEEHSQALSGRLRAILQNQGN
Green monkey APOBEC-3G:
(SEQ ID NO: 301)
MNPQIRNMVEQMEPDIFVYYFNNRPILSGRNTVWLCYEVKTKDPSGPPLD
ANIFQGKLYPEAKDHPEMKFLHWFRKWRQLHRDQEYEVTWYVSWSPCTRC
ANSVATFLAEDPKVTLTIFVARLYYFWKPDYQQALRILCQERGGPHATMK
IMNYNEFQHCWNEFVDGQGKPFKPRKNLPKHYTLLHATLGELLRHVMDPG
TFTSNFNNKPWVSGQRETYLCYKVERSHNDTWVLLNQHRGFLRNQAPDRH
GFPKGRHAELCFLDLIPFWKLDDQQYRVTCFTSWSPCFSCAQKMAKFISN
NKHVSLCIFAARIYDDQGRCQEGLRTLHRDGAKIAVMNYSEFEYCWDTFV
DRQGRPFQPWDGLDEHSQALSGRLRAI
Human APOBEC-3G:
(SEQ ID NO: 302)
MKPHFRNTVERMYRDTFSYNFYNRPILSRRNTVWLCYEVKTKGPSRPPLD
AKIFRGQVYSELKYHPEMRFFHWFSKWRKLHRDQEYEVTWYISWSPCTKC
TRDMATFLAEDPKVTLTIFVARLYYFWDPDYQEALRSLCQKRDGPRATMK
IMNYDEFQHCWSKFVYSQRELFEPWNNLPKYYILLHIMLGEILRHSMDPP
TFTFNFNNEPWVRGRHETYLCYEVERMHNDTWVLLNQRRGFLCNQAPHKH
GFLEGRHAELCFLDVIPFWKLDLDQDYRVTCFTSWSPCFSCAQEMAKFIS
KNKHVSLCIFTARIYDDQGRCQEGLRTLAEAGAKISIMTYSEFKHCWDTF
VDHQGCPFQPWDGLDEHSQDLSGRLRAILQNQEN
Human APOBEC-3F:
(SEQ ID NO: 303)
MKPHFRNTVERMYRDTFSYNFYNRPILSRRNTVWLCYEVKTKGPSRPRLD
AKIFRGQVYSQPEHHAEMCFLSWFCGNQLPAYKCFQITWFVSWTPCPDCV
AKLAEFLAEHPNVTLTISAARLYYYWERDYRRALCRLSQAGARVKIMDDE
EFAYCWENFVYSEGQPFMPWYKFDDNYAFLHRTLKEILRNPMEAMYPHIF
YFHFKNLRKAYGRNESWLCFTMEVVKHHSPVSWKRGVFRNQVDPETHCHA
ERCFLSWFCDDILSPNTNYEVTWYTSWSPCPECAGEVAEFLARHSNVNLT
IFTARLYYFWDTDYQEGLRSLSQEGASVEIMGYKDFKYCWENFVYNDDEP
FKPWKGLKYNFLFLDSKLQEILE
Human APOBEC-3B:
(SEQ ID NO: 304)
MNPQIRNPMERMYRDTFYDNFENEPILYGRSYTWLCYEVKIKRGRSNLLW
DTGVFRGQVYFKPQYHAEMCFLSWFCGNQLPAYKCFQITWFVSWTPCPDC
VAKLAEFLSEHPNVTLTISAARLYYYWERDYRRALCRLSQAGARVTIMDY
EEFAYCWENFVYNEGQQFMPWYKFDENYAFLHRTLKEILRYLMDPDTFTF
NFNNDPLVLRRRQTYLCYEVERLDNGTWVLMDQHMGFLCNEAKNLLCGFY
GRHAELRFLDLVPSLQLDPAQIYRVTWFISWSPCFSWGCAGEVRAFLQEN
THVRLRIFAARIYDYDPLYKEALQMLRDAGAQVSIMTYDEFEYCWDTFVY
RQGCPFQPWDGLEEHSQALSGRLRAILQNQGN
Rat APOBEC-3B:
(SEQ ID NO: 305)
MQPQGLGPNAGMGPVCLGCSHRRPYSPIRNPLKKLYQQTFYFHFKNVRYA
WGRKNNFLCYEVNGMDCALPVPLRQGVFRKQGHIHAELCFIYWFHDKVLR
VLSPMEEFKVTWYMSWSPCSKCAEQVARFLAAHRNLSLAIFSSRLYYYLR
NPNYQQKLCRLIQEGVHVAAMDLPEFKKCWNKFVDNDGQPFRPWMRLRIN
FSFYDCKLQEIFSRMNLLREDVFYLQFNNSHRVKPVQNRYYRRKSYLCYQ
LERANGQEPLKGYLLYKKGEQHVEILFLEKMRSMELSQVRITCYLTWSPC
PNCARQLAAFKKDHPDLILRIYTSRLYFYWRKKFQKGLCTLWRSGIHVDV
MDLPQFADCWTNFVNPQRPFRPWNELEKNSWRIQRRLRRIKESWGL
Bovine APOBEC-3B:
(SEQ ID NO: 306)
DGWEVAFRSGTVLKAGVLGVSMTEGWAGSGHPGQGACVWTPGTRNTMNLL
REVLFKQQFGNQPRVPAPYYRRKTYLCYQLKQRNDLTLDRGCFRNKKQRH
AEIRFIDKINSLDLNPSQSYKIICYITWSPCPNCANELVNFITRNNHLKL
EIFASRLYFHWIKSFKMGLQDLQNAGISVAVMTHTEFEDCWEQFVDNQSR
PFQPWDKLEQYSASIRRRLQRILTAPI
Chimpanzee APOBEC-3B:
(SEQ ID NO: 307)
MNPQIRNPMEWMYQRTFYYNFENEPILYGRSYTWLCYEVKIRRGHSNLLW
DTGVFRGQMYSQPEHHAEMCFLSWFCGNQLSAYKCFQITWFVSWTPCPDC
VAKLAKFLAEHPNVTLTISAARLYYYWERDYRRALCRLSQAGARVKIMDD
EEFAYCWENFVYNEGQPFMPWYKFDDNYAFLHRTLKEIIRHLMDPDTFTF
NFNNDPLVLRRHQTYLCYEVERLDNGTWVLMDQHMGFLCNEAKNLLCGFY
GRHAELRFLDLVPSLQLDPAQIYRVTWFISWSPCFSWGCAGQVRAFLQEN
THVRLRIFAARIYDYDPLYKEALQMLRDAGAQVSIMTYDEFEYCWDTFVY
RQGCPFQPWDGLEEHSQALSGRLRAILQVRASSLCMVPHRPPPPPQSPGP
CLPLCSEPPLGSLLPTGRPAPSLPFLLTASFSFPPPASLPPLPSLSLSPG
HLPVPSFHSLTSCSIQPPCSSRIRETEGWASVSKEGRDLG
Human APOBEC-3C:
(SEQ ID NO: 308)
MNPQIRNPMKAMYPGTFYFQFKNLWEANDRNETWLCFTVEGIKRRSVVSW
KTGVFRNQVDSETHCHAERCFLSWFCDDILSPNTKYQVTWYTSWSPCPDC
AGEVAEFLARHSNVNLTIFTARLYYFQYPCYQEGLRSLSQEGVAVEIMDY
EDFKYCWENFVYNDNEPFKPWKGLKTNFRLLKRRLRESLQ
Gorilla APOBEC3C:
(SEQ ID NO: 309)
MNPQIRNPMKAMYPGTFYFQFKNLWEANDRNETWLCFTVEGIKRRSVVSW
KTGVFRNQVDSETHCHAERCFLSWFCDDILSPNTNYQVTWYTSWSPCPEC
AGEVAEFLARHSNVNLTIFTARLYYFQDTDYQEGLRSLSQEGVAVKIMDY
KDFKYCWENFVYNDDEPFKPWKGLKYNFRFLKRRLQEILE
Human APOBEC-3A:
(SEQ ID NO: 310)
MEASPASGPRHLMDPHIFTSNFNNGIGRHKTYLCYEVERLDNGTSVKMDQ
HRGFLHNQAKNLLCGFYGRHAELRFLDLVPSLQLDPAQIYRVTWFISWSP
CFSWGCAGEVRAFLQENTHVRLRIFAARIYDYDPLYKEALQMLRDAGAQV
SIMTYDEFKHCWDTFVDHQGCPFQPWDGLDEHSQALSGRLRAILQNQGN
Rhesus macaque APOBEC-3A:
(SEQ ID NO: 311)
MDGSPASRPRHLMDPNTFTFNFNNDLSVRGRHQTYLCYEVERLDNGTWVP
MDERRGFLCNKAKNVPCGDYGCHVELRFLCEVPSWQLDPAQTYRVTWFIS
WSPCFRRGCAGQVRVFLQENKHVRLRIFAARIYDYDPLYQEALRTLRDAG
AQVSIMTYEEFKHCWDTFVDRQGRPFQPWDGLDEHSQALSGRLRAILQNQ
GN
Bovine APOBEC-3A:
(SEQ ID NO: 312)
MDEYTFTENFNNQGWPSKTYLCYEMERLDGDATIPLDEYKGFVRNKGLDQ
PEKPCHAELYFLGKIHSWNLDRNQHYRLTCFISWSPCYDCAQKLTTFLKE
NHHISLHILASRIYTHNRFGCHQSGLCELQAAGARITIMTFEDFKHCWET
FVDHKGKPFQPWEGLNVKSQALCTELQAILKTQQN
Human APOBEC-3H:
(SEQ ID NO: 313)
MALLTAETFRLQFNNKRRLRRPYYPRKALLCYQLTPQNGSTPTRGYFENK
KKCHAEICFINEIKSMGLDETQCYQVTCYLTWSPCSSCAWELVDFIKAHD
HLNLGIFASRLYYHWCKPQQKGLRLLCGSQVPVEVMGFPKFADCWENFVD
HEKPLSFNPYKMLEELDKNSRAIKRRLERIKIPGVRAQGRYMDILCDAEV
Rhesus macaque APOBEC-3H:
(SEQ ID NO: 314)
MALLTAKTFSLQFNNKRRVNKPYYPRKALLCYQLTPQNGSTPTRGHLKNK
KKDHAEIRFINKIKSMGLDETQCYQVTCYLTWSPCPSCAGELVDFIKAHR
HLNLRIFASRLYYHWRPNYQEGLLLLCGSQVPVEVMGLPEFTDCWENFVD
HKEPPSFNPSEKLEELDKNSQAIKRRLERIKSRSVDVLENGLRSLQLGPV
TPSSSIRNSR
Human APOBEC-3D:
(SEQ ID NO: 315)
MNPQIRNPMERMYRDTFYDNFENEPILYGRSYTWLCYEVKIKRGRSNLLW
DTGVFRGPVLPKRQSNHRQEVYFRFENHAEMCFLSWFCGNRLPANRRFQI
TWFVSWNPCLPCVVKVTKFLAEHPNVTLTISAARLYYYRDRDWRWVLLRL
HKAGARVKIMDYEDFAYCWENFVCNEGQPFMPWYKFDDNYASLHRTLKEI
LRNPMEAMYPHIFYFHFKNLLKACGRNESWLCFTMEVTKHHSAVFRKRGV
FRNQVDPETHCHAERCFLSWFCDDILSPNTNYEVTWYTSWSPCPECAGEV
AEFLARHSNVNLTIFTARLCYFWDTDYQEGLCSLSQEGASVKIMGYKDFV
SCWKNFVYSDDEPFKPWKGLQTNFRLLKRRLREILQ
Human APOBEC-1:
(SEQ ID NO: 316)
MTSEKGPSTGDPTLRRRIEPWEFDVFYDPRELRKEACLLYEIKWGMSRKI
WRSSGKNTTNHVEVNFIKKFTSERDFHPSMSCSITWFLSWSPCWECSQAI
REFLSRHPGVTLVIYVARLFWHMDQQNRQGLRDLVNSGVTIQIMRASEYY
HCWRNFVNYPPGDEAHWPQYPPLWMMLYALELHCIILSLPPCLKISRRWQ
NHLTFFRLHLQNCHYQTIPPHILLATGLIHPSVAWR
Mouse APOBEC-1:
(SEQ ID NO: 317)
MSSETGPVAVDPTLRRRIEPHEFEVFFDPRELRKETCLLYEINWGGRHSV
WRHTSQNTSNHVEVNFLEKFTTERYFRPNTRCSITWFLSWSPCGECSRAI
TEFLSRHPYVTLFIYIARLYHHTDQRNRQGLRDLISSGVTIQIMTEQEYC
YCWRNFVNYPPSNEAYWPRYPHLWVKLYVLELYCIILGLPPCLKILRRKQ
PQLTFFTITLQTCHYQRIPPHLLWATGLK
Rat APOBEC-1:
(SEQ ID NO: 318)
[sequence omitted]
Human APOBEC-2:
(SEQ ID NO: 319)
MAQKEEAAVATEAASQNGEDLENLDDPEKLKELIELPPFEIVTGERLPAN
FFKFQFRNVEYSSGRNKTFLCYVVEAQGKGGQVQASRGYLEDEHAAAHAE
EAFFNTILPAFDPALRYNVTWYVSSSPCAACADRIIKTLSKTKNLRLLIL
VGRLFMWEEPEIQAALKKLKEAGCKLRIMKPQDFEYVWQNFVEQEEGESK
AFQPWEDIQENFLYYEEKLADILK
Mouse APOBEC-2:
(SEQ ID NO: 320)
MAQKEEAAEAAAPASQNGDDLENLEDPEKLKELIDLPPFEIVTGVRLPVN
FFKFQFRNVEYSSGRNKTFLCYVVEVQSKGGQAQATQGYLEDEHAGAHAE
EAFFNTILPAFDPALKYNVTWYVSSSPCAACADRILKTLSKTKNLRLLIL
VSRLFMWEEPEVQAALKKLKEAGCKLRIMKPQDFEYIWQNFVEQEEGESK
AFEPWEDIQENFLYYEEKLADILK
Rat APOBEC-2:
(SEQ ID NO: 321)
MAQKEEAAEAAAPASQNGDDLENLEDPEKLKELIDLPPFEIVTGVRLPVN
FFKFQFRNVEYSSGRNKTFLCYVVEAQSKGGQVQATQGYLEDEHAGAHAE
EAFFNTILPAFDPALKYNVTWYVSSSPCAACADRILKTLSKTKNLRLLIL
VSRLFMWEEPEVQAALKKLKEAGCKLRIMKPQDFEYLWQNFVEQEEGESK
AFEPWEDIQENFLYYEEKLADILK
Bovine APOBEC-2:
(SEQ ID NO: 322)
MAQKEEAAAAAEPASQNGEEVENLEDPEKLKELIELPPFEIVTGERLPAH
YFKFQFRNVEYSSGRNKTFLCYVVEAQSKGGQVQASRGYLEDEHATNHAE
EAFFNSIMPTFDPALRYMVTWYVSSSPCAACADRIVKTLNKTKNLRLLIL
VGRLFMWEEPEIQAALRKLKEAGCRLRIMKPQDFEYIWQNFVEQEEGESK
AFEPWEDIQENFLYYEEKLADILK
Petromyzon marinus CDA1 (pmCDA1):
(SEQ ID NO: 323)
MTDAEYVRIHEKLDIYTFKKQFFNNKKSVSHRCYVLFELKRRGERRACFW
GYAVNKPQSGTERGIHAEIFSIRKVEEYLRDNPGQFTINWYSSWSPCADC
AEKILEWYNQELRGNGHTLKIWACKLYYEKNARNQIGLWNLRDNGVGLNV
MVSEHYQCCRKIFIQSSHNQLNENRWLEKTLKRAEKRRSELSIMIQVKIL
HTTKSPAV
Human APOBEC3G D316R_D317R:
(SEQ ID NO: 324)
MKPHFRNTVERMYRDTFSYNFYNRPILSRRNTVWLCYEVKTKGPSRPPLD
AKIFRGQVYSELKYHPEMRFFHWFSKWRKLHRDQEYEVTWYISWSPCTKC
TRDMATFLAEDPKVTLTIFVARLYYFWDPDYQEALRSLCQKRDGPRATMK
IMNYDEFQHCWSKFVYSQRELFEPWNNLPKYYILLHIMLGEILRHSMDPP
TFTFNFNNEPWVRGRHETYLCYEVERMHNDTWVLLNQRRGFLCNQAPHKH
GFLEGRHAELCFLDVIPFWKLDLDQDYRVTCFTSWSPCFSCAQEMAKFIS
KNKHVSLCIFTARIYRRQGRCQEGLRTLAEAGAKISIMTYSEFKHCWDTF
VDHQGCPFQPWDGLDEHSQDLSGRLRAILQNQEN
Human APOBEC3G chain A:
(SEQ ID NO: 325)
MDPPTFTFNFNNEPWVRGRHETYLCYEVERMHNDTWVLLNQRRGFLCNQA
PHKHGFLEGRHAELCFLDVIPFWKLDLDQDYRVTCFTSWSPCFSCAQEMA
KFISKNKHVSLCIFTARIYDDQGRCQEGLRTLAEAGAKISIMTYSEFKHC
WDTFVDHQGCPFQPWDGLDEHSQDLSGRLRAILQ
Human APOBEC3G chain AD120R_D121R:
(SEQ ID NO: 326)
MDPPTFTFNFNNEPWVRGRHETYLCYEVERMHNDTWVLLNQRRGFLCNQA
PHKHGFLEGRHAELCFLDVIPFWKLDLDQDYRVTCFTSWSPCFSCAQEMA
KFISKNKHVSLCIFTARIYRRQGRCQEGLRTLAEAGAKISIMTYSEFKHC
WDTFVDHQGCPFQPWDGLDEHSQDLSGRLRAILQ

[0301] Any of the aforementioned DNA effector domains may be subjected to a continuous evolution process (e.g., PACE) or may be otherwise further evolved using a mutagenesis methodology known in the art.

[0302] In some embodiments, the cytidine deaminase is an apolipoprotein B mRNA-editing complex (APOBEC) family deaminase. In some embodiments, the deaminase is an APOBEC1 deaminase. In some embodiments, the deaminase is an APOBEC2 deaminase. In some embodiments, the deaminase is an APOBEC3 deaminase. In some embodiments, the deaminase is an APOBEC3A deaminase. In some embodiments, the deaminase is an APOBEC3B deaminase. In some embodiments, the deaminase is an APOBEC3C deaminase. In some embodiments, the deaminase is an APOBEC3D deaminase. In some embodiments, the deaminase is an APOBEC3E deaminase. In some embodiments, the deaminase is an APOBEC3F deaminase. In some embodiments, the deaminase is an APOBEC3G deaminase. In some embodiments, the deaminase is an APOBEC3H deaminase. In some embodiments, the deaminase is an APOBEC4 deaminase. In some embodiments, the deaminase is an activation-induced deaminase (AID). In some embodiments, the deaminase is a vertebrate deaminase. In some embodiments, the deaminase is an invertebrate deaminase. In some embodiments, the deaminase is a human, chimpanzee, gorilla, monkey, cow, dog, rat, or mouse deaminase. In some embodiments, the deaminase is a human deaminase. In some embodiments, the deaminase is a rat deaminase, e.g., rAPOBEC1.

[0303] Some aspects of the disclosure are based on the recognition that modulating the deaminase domain catalytic activity of any of the fusion proteins provided herein, for example by making point mutations in the deaminase domain, affect the processivity of the fusion proteins (e.g., base editors). For example, mutations that reduce, but do not eliminate, the catalytic activity of a deaminase domain within a base editing fusion protein can make it less likely that the deaminase domain will catalyze the deamination of a residue adjacent to a target residue, thereby narrowing the deamination window. The ability to narrow the deamination window may prevent unwanted deamination of residues adjacent of specific target residues, which may decrease or prevent off-target effects.

[0304] In some embodiments, any of the fusion proteins provided herein comprise a deaminase domain (e.g., a cytidine deaminase domain) that has reduced catalytic deaminase activity. In some embodiments, any of the fusion proteins provided herein comprise a deaminase domain (e.g., a cytidine deaminase domain) that has a reduced catalytic deaminase activity as compared to an appropriate control. For example, the appropriate control may be the deaminase activity of the deaminase prior to introducing one or more mutations into the deaminase. In other embodiments, the appropriate control may be a wild-type deaminase. In some embodiments, the appropriate control is a wild-type apolipoprotein B mRNA-editing complex (APOBEC) family deaminase. In some embodiments, the appropriate control is an APOBEC1 deaminase, an APOBEC2 deaminase, an APOBEC3A deaminase, an APOBEC3B deaminase, an APOBEC3C deaminase, an APOBEC3D deaminase, an APOBEC3F deaminase, an APOBEC3G deaminase, or an APOBEC3H deaminase. In some embodiments, the appropriate control is an activation induced deaminase (AID). In some embodiments, the appropriate control is a cytidine deaminase 1 from Petromyzon marinus (pmCDA1). In some embodiments, the deaminase domain may be a deaminase domain that has at least 1%, at least 5%, at least 15%, at least 20%, at least 25%, at least 30%, at least 40%, at least 50%, at least 60%, at least 70%, at least 80%, at least 90%, or at least 95% less catalytic deaminase activity as compared to an appropriate control.

[0305] The apolipoprotein B mRNA-editing complex (APOBEC) family of cytidine deaminase enzymes encompasses eleven proteins that serve to initiate mutagenesis in a controlled and beneficial manner. One family member, activation-induced cytidine deaminase (AID), is responsible for the maturation of antibodies by converting cytosines in ssDNA to uracils in a transcription-dependent, strand-biased fashion. The apolipoprotein B editing complex 3 (APOBEC3) enzyme provides protection to human cells against a certain HIV-1 strain via the deamination of cytosines in reverse-transcribed viral ssDNA. These proteins all require a Zn2+-coordinating motif (His-X-Glu-X23-26-Pro-Cys-X2-4-Cys; (SEQ ID NO: 67) and bound water molecule for catalytic activity. The Glu residue acts to activate the water molecule to a zinc hydroxide for nucleophilic attack in the deamination reaction. Each family member preferentially deaminates at its own particular “hotspot”, ranging from WRC (W is A or T, R is A or G) for hAID, to TTC for hAPOBEC3F. A recent crystal structure of the catalytic domain of APOBEC3G revealed a secondary structure comprised of a five-stranded β-sheet core flanked by six a-helices, which is believed to be conserved across the entire family. The active center loops have been shown to be responsible for both ssDNA binding and in determining “hotspot” identity. Overexpression of these enzymes has been linked to genomic instability and cancer, thus highlighting the importance of sequence-specific targeting.

[0306] Some aspects of this disclosure relate to the recognition that the activity of cytidine deaminase enzymes such as APOBEC enzymes can be directed to a specific site in genomic DNA. Without wishing to be bound by any particular theory, advantages of using Cas9 as a recognition agent include (1) the sequence specificity of Cas9 can be easily altered by simply changing the sgRNA sequence; and (2) Cas9 binds to its target sequence by denaturing the dsDNA, resulting in a stretch of DNA that is single-stranded and therefore a viable substrate for the deaminase. It should be understood that other catalytic domains, or catalytic domains from other deaminases, can also be used to generate fusion proteins with Cas9, and that the disclosure is not limited in this regard.

[0307] Some aspects of this disclosure are based on the recognition that Cas9:deaminase fusion proteins can efficiently deaminate nucleotides. In view of the results provided herein regarding the nucleotides that can be targeted by Cas9:deaminase fusion proteins, a person of skill in the art will be able to design suitable guide RNAs to target the fusion proteins to a target sequence that comprises a nucleotide to be deaminated.

[0308] In certain embodiments, the reference cytidine deaminase domain comprises a “FERNY” polypeptide having an amino acid sequence according to SEQ ID NO: 327 or an amino acid sequence that is at least 60%, 65%, 70%, 75%, 80%, 85%, 90%, 95, 98%, 99%, or 99.5% identical to SEQ ID NO: 327, as follows:

(SEQ ID NO: 327)
MFERNYDPRELRKETYLLYEIKWGKSGKLWRHWCQNNRTQHAEVYFLENI
FNARRFNPSTHCSITWYLSWSPCAECSQKIVDFLKEHPNVNLEIYVARLY
YHEDERNRQGLRDLVNSGVTIRIMDLPDYNYCWKTFVSDQGGDEDYWPGH
FAPWIKQYSLKL

[0309] In certain other embodiment, the evolved cytidine deaminase domain (i.e., as a result of the continuous evolution process described herein) comprises a “evoFERNY” polypeptide having an amino acid sequence according to SEQ ID NO: 328 or an amino acid sequence that is at least 60%, 65%, 70%, 75%, 80%, 85%, 90%, 95, 98%, 99%, or 99.5% identical to SEQ ID NO: 328, comprising an H102P and D104N substitutions, as follows:

(SEQ ID NO: 328)
MFERNYDPRELRKETYLLYEIKWGKSGKLWRHWCQNNRTQHAEVYFLENI
FNARRFNPSTHCSITWYLSWSPCAECSQKIVDFLKEHPNVNLEIYVARLY
YPENERNRQGLRDLVNSGVTIRIMDLPDYNYCWKTFVSDQGGDEDYWPGH
FAPWIKQYSLKL

[0310] In other embodiments, the reference cytidine deaminase domain comprises a “Rat APOBEC-1” polypeptide having an amino acid sequence according to SEQ ID NO: 329 or an amino acid sequence that is at least 60%, 65%, 70%, 75%, 80%, 85%, 90%, 95, 98%, 99%, or 99.5% identical to SEQ ID NO: 329, as follows:

(SEQ ID NO: 329)
[sequence omitted]

[0311] In certain other embodiment, the evolved cytidine deaminase domain (i.e., as a result of the continuous evolution process described herein) comprises a “evoAPOBEC” polypeptide having an amino acid sequence according to SEQ ID NO: 130 or an amino acid sequence that is at least 60%, 65%, 70%, 75%, 80%, 85%, 90%, 95, 98%, 99%, or 99.5% identical to SEQ ID NO: 330, and comprising substitutions E4K; H109N; H122L; D124N; R154H; A1655; P2015; F2055, as follows:

(SEQ ID NO: 330)
MSSKTGPVAVDPTLRRRIEPHEFEVFFDPRELRKETCLLYEINWGGRHSI
WRHTSQNTNKHVEVNFIEKFTTERYFCPNTRCSITWFLSWSPCGECSRAI
TEFLSRYPNVTLFIYIARLYHLANPRNRQGLRDLISSGVTIQIMTEQESG
YCWHNFVNYSPSNESHWPRYPHLWVRLYVLELYCIILGLPPCLNILRRKQ
SQLTSFTIALQSCHYQRLPPHILWATGLK

[0312] In still other embodiments, the reference cytidine deaminase domain comprises a “Petromyzon marinus CDA1 (pmCDA1)” polypeptide having an amino acid sequence according to SEQ ID NO: 331 or an amino acid sequence that is at least 60%, 65%, 70%, 75%, 80%, 85%, 90%, 95, 98%, 99%, or 99.5% identical to SEQ ID NO: 331, as follows:

(SEQ ID NO: 331)
MTDAEYVRIHEKLDIYTFKKQFFNNKKSVSHRCYVLFELKRRGERRACFW
GYAVNKPQSGTERGIHAEIFSIRKVEEYLRDNPGQFTINWYSSWSPCADC
AEKILEWYNQELRGNGHTLKIWACKLYYEKNARNQIGLWNLRDNGVGLNV
MVSEHYQCCRKIFIQSSHNQLNENRWLEKTLKRAEKRRSELSIMIQVKIL
HTTKSPAV

[0313] In other embodiment, the evolved cytidine deaminase domain (i.e., as a result of the continuous evolution process described herein) comprises a “evoCDA” polypeptide having an amino acid sequence according to SEQ ID NO: 132 or an amino acid sequence that is at least 60%, 65%, 70%, 75%, 80%, 85%, 90%, 95, 98%, 99%, or 99.5% identical to SEQ ID NO: 332 and comprising substitutions F23S; A123V; I195F, as follows:

(SEQ ID NO: 332)
MTDAEYVRIHEKLDIYTFKKQFSNNKKSVSHRCYVLFELKRRGERRACFW
GYAVNKPQSGTERGIHAEIFSIRKVEEYLRDNPGQFTINWYSSWSPCADC
AEKILEWYNQELRGNGHTLKIWVCKLYYEKNARNQIGLWNLRDNGVGLNV
MVSEHYQCCRKIFIQSSHNQLNENRWLEKTLKRAEKRRSELSIMFQVKIL
HTTKSPAV

[0314] In yet other embodiments, the reference cytidine deaminase domain comprises a “Anc689 APOBEC” polypeptide having an amino acid sequence according to SEQ ID NO: 133 or an amino acid sequence that is at least 60%, 65%, 70%, 75%, 80%, 85%, 90%, 95, 98%, 99%, or 99.5% identical to SEQ ID NO: 333, as follows:

(SEQ ID NO: 333)
MSSETGPVAVDPTLRRRIEPHEFEVFFDPRELRKETCLLYEIKWGTSHKI
WRHSSKNTTKHVEVNFIEKFTSERHFCPSTSCSITWFLSWSPCGECSKAI
TEFLSQHPNVTLVIYVARLYHHMDQQNRQGLRDLVNSGVTIQIMTAPEYD
YCWRNFVNYPPGKEAHWPRYPPLWMKLYALELHAGILGLPPCLNILRRKQ
PQLTFFTIALQSCHYQRLPPHILWATGLK

[0315] In other embodiments, the evolved cytidine deaminase domain (i.e., as a result of the continuous evolution process described herein) comprises a “evoAnc689 APOBEC” polypeptide having an amino acid sequence according to SEQ ID NO: 334 or an amino acid sequence that is at least 60%, 65%, 70%, 75%, 80%, 85%, 90%, 95, 98%, 99%, or 99.5% identical to SEQ ID NO: 334 and comprising substitutions E4K; H122L; D124N; R154H; A1655; P2015; F2055, as follows:

(SEQ ID NO: 334)
MSSKTGPVAVDPTLRRRIEPHEFEVFFDPRELRKETCLLYEIKWGTSHKI
WRHSSKNTTKHVEVNFIEKFTSERHFCPSTSCSITWFLSWSPCGECSKAI
TEFLSQHPNVTLVIYVARLYHLMNQQNRQGLRDLVNSGVTIQIMTAPEYD
YCWHNFVNYPPGKESHWPRYPPLWMKLYALELHAGILGLPPCLNILRRKQ
SQLTSFTIALQSCHYQRLPPHILWATGLK

[0316] In some aspects, the specification provides evolved cytidine deaminases which are used to construct base editors that have improved properties. For example, evolved cytidine deaminases, such as those provided herein, are capable of improving base editing efficiency and/or improving the ability of base editors to more efficiently edit bases regardless of the surrounding sequence. For example, in some aspects the disclosure provides evolved APOBEC deaminases (e.g., evolved rAPOBEC1) with improved base editing efficiency in the context of a 5′-G-3′ when it is 5′ to a target base (e.g., C). In some embodiments, the disclosure provides base editors comprising any of the evolved cytidine deaminases provided herein. It should be appreciated that any of the evolved cytidine deaminases provided herein may be used as a deaminase in a base editor protein, such as any of the base editors provided herein. It should also be appreciated that the disclosure contemplates cytidine deaminases having any of the mutations provided herein, for example any of the mutations described in the Examples section.

### Other Functional Domains

[0317] In various embodiments, the base editors and their various components may comprise additional functional moieties, such as, but not limited to, linkers, uracil glycosylase inhibitors, nuclear localization signals, split-intein sequences (to join split proteins, such as split napDNAbps, split adenine deaminases, split cytidine deaminases, split CBEs, or split ABEs), and RNA-protein recruitment domains (such as, MS2 tagging system).

[0318] (1) Linkers

[0319] In certain embodiments, linkers may be used to link any of the protein or protein domains described herein (e.g., a deaminase domain and a Cas9 domain). The linker may be as simple as a covalent bond, or it may be a polymeric linker many atoms in length. In certain embodiments, the linker is a polypeptide or based on amino acids. In other embodiments, the linker is not peptide-like. In certain embodiments, the linker is a covalent bond (e.g., a carbon-carbon bond, disulfide bond, carbon-heteroatom bond, etc.). In certain embodiments, the linker is a carbon-nitrogen bond of an amide linkage. In certain embodiments, the linker is a cyclic or acyclic, substituted or unsubstituted, branched or unbranched aliphatic or heteroaliphatic linker. In certain embodiments, the linker is polymeric (e.g., polyethylene, polyethylene glycol, polyamide, polyester, etc.). In certain embodiments, the linker comprises a monomer, dimer, or polymer of aminoalkanoic acid. In certain embodiments, the linker comprises an aminoalkanoic acid (e.g., glycine, ethanoic acid, alanine, beta-alanine, 3-aminopropanoic acid, 4-aminobutanoic acid, 5-pentanoic acid, etc.). In certain embodiments, the linker comprises a monomer, dimer, or polymer of aminohexanoic acid (Ahx). In certain embodiments, the linker is based on a carbocyclic moiety (e.g., cyclopentane, cyclohexane). In other embodiments, the linker comprises a polyethylene glycol moiety (PEG). In other embodiments, the linker comprises amino acids. In certain embodiments, the linker comprises a peptide. In certain embodiments, the linker comprises an aryl or heteroaryl moiety. In certain embodiments, the linker is based on a phenyl ring. The linker may include functionalized moieties to facilitate attachment of a nucleophile (e.g., thiol, amino) from the peptide to the linker. Any electrophile may be used as part of the linker. Exemplary electrophiles include, but are not limited to, activated esters, activated amides, Michael acceptors, alkyl halides, aryl halides, acyl halides, and isothiocyanates.

[0320] In some embodiments, the linker is an amino acid or a plurality of amino acids (e.g., a peptide or protein). In some embodiments, the linker is a bond e.g., a covalent bond), an organic molecule, group, polymer, or chemical moiety. In some embodiments, the linker is 5-100 amino acids in length, for example, 5, 6, 7, 8, 9, 10, 11, 12, 13, 14, 15, 16, 17, 18, 19, 20, 21, 22, 23, 24, 25, 26, 27, 28, 29, 30, 31, 32, 33, 34, 35-40, 40-45, 45-50, 50-60, 60-70, 70-80, 80-90, 90-100, 100-110, 110-120, 120-130, 130-140, 140-150, or 150-200 amino acids in length. Longer or shorter linkers are also contemplated. In some embodiments, a linker comprises the amino acid sequence SGSETPGTSESATPES (SEQ ID NO: 135), which may also be referred to as the XTEN linker. In some embodiments, the linker is 32 amino acids in length. In some embodiments, the linker comprises the amino acid sequence (SGGS)₂-SGSETPGTSESATPES-(SGGS)₂ (SEQ ID NO: 136), which may also be referred to as (SGGS)₂-XTEN-(SGGS)₂ (SEQ ID NO: 136). In some embodiments, the linker comprises the amino acid sequence, wherein n is 0, 1, 2, 3, 4, 5, 6, 7, 8, 9, or 10. In some embodiments, a linker comprises the amino acid sequence SGGS (SEQ ID NO: 137). In some embodiments, a linker comprises (SGGS)ₙ (SEQ ID NO: 137), (GGGS)ₙ (SEQ ID NO: 138), (GGGGS). (SEQ ID NO: 139), (G)ₙ (SEQ ID NO: 140), (EAAAK)ₙ (SEQ ID NO: 141), (SGGS)ₙ-SGSETPGTSESATPES-(SGGS)ₙ (SEQ ID NO: 142), (GGS)ₙ (SEQ ID NO: 143), SGSETPGTSESATPES (SEQ ID NO: 135), or (XP)ₙ (SEQ ID NO: 144) motif, or a combination of any of these, wherein n is independently an integer between 1 and 30, and wherein X is any amino acid. In some embodiments, n is 1, 2, 3, 4, 5, 6, 7, 8, 9, 10, 11, 12, 13, 14, or 15. In some embodiments, a linker comprises SGSETPGTSESATPES (SEQ ID NO: 135), and SGGS (SEQ ID NO: 137). In some embodiments, a linker comprises SGGSSGSETPGTSESATPESSGGS (SEQ ID NO: 145). In some embodiments, a linker comprises SGGSSGGSSGSETPGTSESATPESSGGSSGGS (SEQ ID NO: 146). In some embodiments, a linker comprises GGSGGSPGSPAGSPTSTEEGTSESATPESGPGTSTEPSEGSAPGSPAGSPTSTEEGTSTE PSEGSAPGTSTEPSEGSAPGTSESATPESGPGSEPATSGGSGGS (SEQ ID NO: 147). In some embodiments, the linker is 24 amino acids in length. In some embodiments, the linker comprises the amino acid sequence SGGSSGGSSGSETPGTSESATPES (SEQ ID NO: 148). In some embodiments, the linker is 40 amino acids in length. In some embodiments, the linker comprises the amino acid sequence SGGSSGGSSGSETPGTSESATPESSGGSSGGSSGGSSGGS (SEQ ID NO: 149). In some embodiments, the linker is 64 amino acids in length. In some embodiments, the linker comprises the amino acid sequence SGGSSGGSSGSETPGTSESATPESSGGSSGGSSGGSSGGSSGSETPGTSESATPESSGGS SGGS (SEQ ID NO: 150). In some embodiments, the linker is 92 amino acids in length. In some embodiments, the linker comprises the amino acid sequence PGSPAGSPTSTEEGTSESATPESGPGTSTEPSEGSAPGSPAGSPTSTEEGTSTEPSEGSAP GTSTEPSEGSAPGTSESATPESGPGSEPATS (SEQ ID NO: 151). It should be appreciated that any of the linkers provided herein may be used to link a first adenosine deaminase and a second adenosine deaminase; an adenosine deaminase (e.g., a first or a second adenosine deaminase) and a napDNAbp; a napDNAbp and an NLS; or an adenosine deaminase (e.g., a first or a second adenosine deaminase) and an NLS.

[0321] In some embodiments, any of the fusion proteins provided herein, comprise an adenosine deaminase and a napDNAbp that are fused to each other via a linker. In some embodiments, any of the fusion proteins provided herein, comprise a first adenosine deaminase and a second adenosine deaminase that are fused to each other via a linker. In some embodiments, any of the fusion proteins provided herein, comprise an NLS, which may be fused to an adenosine deaminase (e.g., a first and/or a second adenosine deaminase), a nucleic acid programmable DNA binding protein (napDNAbp. Various linker lengths and flexibilities between an adenosine deaminase (e.g., an engineered ecTadA) and a napDNAbp (e.g., a Cas9 domain), and/or between a first adenosine deaminase and a second adenosine deaminase can be employed (e.g., ranging from very flexible linkers of the form (GGGS)ₙ (SEQ ID NO: 138), (GGGGS)ₙ (SEQ ID NO: 139), and (G)ₙ (SEQ ID NO: 140) to more rigid linkers of the form (EAAAK)ₙ (SEQ ID NO: 141), (SGGS)ₙ (SEQ ID NO: 137), SGSETPGTSESATPES (SEQ ID NO: 135) (see, e.g., Guilinger J P, Thompson D B, Liu D R. Fusion of catalytically inactive Cas9 to FokI nuclease improves the specificity of genome modification. Nat. Biotechnol. 2014; 32(6): 577-82; the entire contents are incorporated herein by reference) and (XP)ₙ (SEQ ID NO: 144)) in order to achieve the optimal length for deaminase activity for the specific application. In some embodiments, n is 1, 2, 3, 4, 5, 6, 7, 8, 9, 10, 11, 12, 13, 14, or 15. In some embodiments, the linker comprises a (GGS)ₙ (SEQ ID NO: 143) motif, wherein n is 1, 3, or 7. In some embodiments, the adenosine deaminase and the napDNAbp, and/or the first adenosine deaminase and the second adenosine deaminase of any of the fusion proteins provided herein are fused via a linker comprising the amino acid sequence SGSETPGTSESATPES (SEQ ID NO: 135), SGGS (SEQ ID NO: 137), SGGSSGSETPGTSESATPESSGGS (SEQ ID NO: 145), SGGSSGGSSGSETPGTSESATPESSGGSSGGS (SEQ ID NO: 146), or GGSGGSPGSPAGSPTSTEEGTSESATPESGPGTSTEPSEGSAPGSPAGSPTSTEEGTSTE PSEGSAPGTSTEPSEGSAPGTSESATPESGPGSEPATSGGSGGS (SEQ ID NO: 147). In some embodiments, the linker is 24 amino acids in length. In some embodiments, the linker comprises the amino acid sequence SGGSSGGSSGSETPGTSESATPES (SEQ ID NO: 148). In some embodiments, the linker is 32 amino acids in length. In some embodiments, the linker is 32 amino acids in length. In some embodiments, the linker comprises the amino acid sequence (SGGS)₂-SGSETPGTSESATPES-(SGGS)₂ (SEQ ID NO: 136), which may also be referred to as (SGGS)₂-XTEN-(SGGS)₂ (SEQ ID NO: 136). In some embodiments, the linker comprises the amino acid sequence, wherein n is 0, 1, 2, 3, 4, 5, 6, 7, 8, 9, or 10. In some embodiments, the linker is 40 amino acids in length. In some embodiments, the linker comprises the amino acid sequence SGGSSGGSSGSETPGTSESATPESSGGSSGGSSGGSSGGS (SEQ ID NO: 149). In some embodiments, the linker is 64 amino acids in length. In some embodiments, the linker comprises the amino acid sequence SGGSSGGSSGSETPGTSESATPESSGGSSGGSSGGSSGGSSGSETPGTSESATPESSGGS SGGS (SEQ ID NO: 150). In some embodiments, the linker is 92 amino acids in length. In some embodiments, the linker comprises the amino acid sequence

(SEQ ID NO: 151)
PGSPAGSPTSTEEGTSESATPESGPGTSTEPSEGSAPGSPAGSPTSTEEG
TSTEPSEGSAPGTSTEPSEGSAPGTSESATPESGPGSEPATS.

[0322] (2) UGI Domain

[0323] In other embodiments, the base editors described herein may comprise one or more uracil glycosylase inhibitors. The term “uracil glycosylase inhibitor” or “UGI,” as used herein, refers to a protein that is capable of inhibiting a uracil-DNA glycosylase base-excision repair enzyme. In some embodiments, a UGI domain comprises a wild-type UGI or a UGI as set forth in SEQ ID NO: 41. In some embodiments, the UGI proteins provided herein include fragments of UGI and proteins homologous to a UGI or a UGI fragment. For example, in some embodiments, a UGI domain comprises a fragment of the amino acid sequence set forth in SEQ ID NO: 163. In some embodiments, a UGI fragment comprises an amino acid sequence that comprises at least 60%, at least 65%, at least 70%, at least 75%, at least 80%, at least 85%, at least 90%, at least 95%, at least 96%, at least 97%, at least 98%, at least 99%, or at least 99.5% of the amino acid sequence as set forth in SEQ ID NO: 163. In some embodiments, a UGI comprises an amino acid sequence homologous to the amino acid sequence set forth in SEQ ID NO: 41, or an amino acid sequence homologous to a fragment of the amino acid sequence set forth in SEQ ID NO: 41. In some embodiments, proteins comprising UGI or fragments of UGI or homologs of UGI or UGI fragments are referred to as “UGI variants.” A UGI variant shares homology to UGI, or a fragment thereof. For example a UGI variant is at least 70% identical, at least 75% identical, at least 80% identical, at least 85% identical, at least 90% identical, at least 95% identical, at least 96% identical, at least 97% identical, at least 98% identical, at least 99% identical, at least 99.5% identical, or at least 99.9% identical to a wild type UGI or a UGI as set forth in SEQ ID NO: 41. In some embodiments, the UGI variant comprises a fragment of UGI, such that the fragment is at least 70% identical, at least 80% identical, at least 90% identical, at least 95% identical, at least 96% identical, at least 97% identical, at least 98% identical, at least 99% identical, at least 99.5% identical, or at least 99.9% to the corresponding fragment of wild-type UGI or a UGI as set forth in SEQ ID NO: 41. In some embodiments, the UGI comprises the following amino acid sequence:

[0324] Uracil-DNA Glycosylase Inhibitor:

>sp|P14739|UNGI_BPPB2
(SEQ ID NO: 41)
MTNLSDIIEKETGKQLVIQESILMLPEEVEEVIGNKPESDILVHTAYDES
TDENVMLLTSDAPEYKPWALVIQDSNGENKIKML.

[0325] The base editors described herein may comprise more than one UGI domain, which may be separated by one or more linkers as described herein. It will also be understood that in the context of the herein disclosed base editors, the UGI domain may be linked to a deaminase domain or

[0326] (3) NLS Domains

[0327] In various embodiments, the PE fusion proteins may comprise one or more nuclear localization sequences (NLS), which help promote translocation of a protein into the cell nucleus. Such sequences are well-known in the art and can include the following examples:

| | | SEQUENCE |
|---|---|---|
| DESCRIPTION | SEQUENCE | IDENTIFIER |
| NLS OF SV40 | PKKKRKV | 337 |
| LARGE T-AG | | |
| NLS OF | VSRKRPRP | 338 |
| POLYOMA | | |
| LARGE T-AG | | |
| NLS OF C- | PAAKRVKLD | 339 |
| MYC | | |
| NLS OF TUS- | KLKIKRPVK | 340 |
| PROTEIN | | |
| NLS OF | EGAPPAKRAR | 341 |
| HEPATITIS D | | |
| VIRUS | | |
| ANTIGEN | | |
| NLS OF | PPQPKKKPLDGE | 342 |
| MURINE P53 | | |
| NLS | MKRTADGSEFESPKKKRKV | 343 |
| NLS OF | AVKRPAATKKAGQAKKKKLD | 344 |
| NUCLEO- | | |
| PLASMIN | | |
| NLS | SGGSKRTADGSEFEPKKKRKV | 345 |
| NLS OF EGL- | MSRRRKANPTKLSENAKKLAKEVEN | 346 |
| 13 | | |
| NLS | MDSLLMNRRKFLYQFKNVRWAKGRR | 70 |
| | ETYLC | |

[0328] The NLS examples above are non-limiting. The PE fusion proteins may comprise any known NLS sequence, including any of those described in Cokol et al., “Finding nuclear localization signals,” EMBO Rep., 2000, 1(5): 411-415 and Freitas et al., “Mechanisms and Signals for the Nuclear Import of Proteins,” Current Genomics, 2009, 10(8): 550-7, each of which are incorporated herein by reference.

[0329] In various embodiments, the base editors and constructs encoding the base editors disclosed herein further comprise one or more, preferably, at least two nuclear localization signals. In certain embodiments, the base editors comprise at least two NLSs. In embodiments with at least two NLSs, the NLSs can be the same NLSs or they can be different NLSs. In addition, the NLSs may be expressed as part of a fusion protein with the remaining portions of the base editors. In some embodiments, one or more of the NLSs are bipartite NLSs (“bpNLS”). In certain embodiments, the disclosed fusion proteins comprise two bipartite NLSs. In some embodiments, the disclosed fusion proteins comprise more than two bipartite NLSs.

[0330] The location of the NLS fusion can be at the N-terminus, the C-terminus, or within a sequence of a base editor (e.g., inserted between the encoded napDNAbp component (e.g., Cas9) and a deaminase (e.g., a cytidine or adenosine deaminase).

[0331] The NLSs may be any known NLS sequence in the art. The NLSs may also be any future-discovered NLSs for nuclear localization. The NLSs also may be any naturally-occurring NLS, or any non-naturally occurring NLS (e.g., an NLS with one or more desired mutations).

[0332] The term “nuclear localization sequence” or “NLS” refers to an amino acid sequence that promotes import of a protein into the cell nucleus, for example, by nuclear transport. Nuclear localization sequences are known in the art and would be apparent to the skilled artisan. For example, NLS sequences are described in Plank et al., International PCT application PCT/EP2000/011690, filed Nov. 23, 2000, published as WO/2001/038547 on May 31, 2001, the contents of which are incorporated herein by reference. In some embodiments, an NLS comprises the amino acid sequence PKKKRKV (SEQ ID NO: 152), MDSLLMNRRKFLYQFKNVRWAKGRRETYLC (SEQ ID NO: 70), KRTADGSEFESPKKKRKV (SEQ ID NO: 243), or KRTADGSEFEPKKKRKV (SEQ ID NO: 244). In other embodiments, NLS comprises the amino acid sequences

(SEQ ID NO: 347)
NLSKRPAAIKKAGQAKKKK,
(SEQ ID NO: 339)
PAAKRVKLD,
(SEQ ID NO: 348)
RQRRNELKRSF,
(SEQ ID NO: 349)
NQSSNFGPMKGGNFGGRSSGPYGGGGQYFAKPRNQGGY.

[0333] In one aspect of the disclosure, a base editor may be modified with one or more nuclear localization signals (NLS), preferably at least two NLSs. In certain embodiments, the base editors are modified with two or more NLSs. The disclosure contemplates the use of any nuclear localization signal known in the art at the time of the disclosure, or any nuclear localization signal that is identified or otherwise made available in the state of the art after the time of the instant filing. A representative nuclear localization signal is a peptide sequence that directs the protein to the nucleus of the cell in which the sequence is expressed. A nuclear localization signal is predominantly basic, can be positioned almost anywhere in a protein's amino acid sequence, generally comprises a short sequence of four amino acids (Autieri & Agrawal, (1998) J. Biol. Chem. 273: 14731-37, incorporated herein by reference) to eight amino acids, and is typically rich in lysine and arginine residues (Magin et al., (2000) Virology 274: 11-16, incorporated herein by reference). Nuclear localization signals often comprise proline residues. A variety of nuclear localization signals have been identified and have been used to effect transport of biological molecules from the cytoplasm to the nucleus of a cell. See, e.g., Tinland et al., (1992) Proc. Natl. Acad. Sci. U.S.A. 89:7442-46; Moede et al., (1999) FEBS Lett. 461:229-34, which is incorporated by reference. Translocation is currently thought to involve nuclear pore proteins.

[0334] Most NLSs can be classified in three general groups: (i) a monopartite NLS exemplified by the SV40 large T antigen NLS (PKKKRKV (SEQ ID NO: 152)); (ii) a bipartite motif consisting of two basic domains separated by a variable number of spacer amino acids and exemplified by the Xenopus nucleoplasmin NLS (KRXXXXXXXXXXKKKL (SEQ ID NO: 335)); and (iii) noncanonical sequences such as M9 of the hnRNP A1 protein, the influenza virus nucleoprotein NLS, and the yeast Gal4 protein NLS (Dingwall and Laskey 1991).

[0335] Nuclear localization signals appear at various points in the amino acid sequences of proteins. NLS's have been identified at the N-terminus, the C-terminus, and in the central region of proteins. Thus, the disclosure provides base editors that may be modified with one or more NLSs at the C-terminus, the N-terminus, as well as at an internal region of the base editor. The residues of a longer sequence that do not function as component NLS residues should be selected so as not to interfere, for example tonically or sterically, with the nuclear localization signal itself. Therefore, although there are no strict limits on the composition of an NLS-comprising sequence, in practice, such a sequence can be functionally limited in length and composition.

[0336] The present disclosure contemplates any suitable means by which to modify a base editor to include one or more NLSs. In one aspect, the base editors may be engineered to express a base editor protein that is translationally fused at its N-terminus or its C-terminus (or both) to one or more NLSs, i.e., to form a base editor-NLS fusion construct. In other embodiments, the base editor-encoding nucleotide sequence may be genetically modified to incorporate a reading frame that encodes one or more NLSs in an internal region of the encoded base editor. In addition, the NLSs may include various amino acid linkers or spacer regions encoded between the base editor and the N-terminally, C-terminally, or internally-attached NLS amino acid sequence, e.g., and in the central region of proteins. Thus, the present disclosure also provides for nucleotide constructs, vectors, and host cells for expressing fusion proteins that comprise a base editor and one or more NLSs.

[0337] The base editors described herein may also comprise nuclear localization signals which are linked to a base editor through one or more linkers, e.g., a polymeric, amino acid, nucleic acid, polysaccharide, or chemical linker element. The linkers within the contemplated scope of the disclosure are not intended to have any limitations and can be any suitable type of molecule (e.g., polymer, amino acid, polysaccharide, nucleic acid, lipid, or any synthetic chemical linker domain) and be joined to the base editor by any suitable strategy that effectuates forming a bond (e.g., covalent linkage, hydrogen bonding) between the base editor and the one or more NLSs.

[0338] (4) Split-Intein/Intein Domains

[0339] It will be understood that in some embodiments (e.g., delivery of a base editor in vivo using AAV particles), it may be advantageous to split a polypeptide (e.g., a deaminase or a napDNAbp) or a fusion protein (e.g., a base editor) into an N-terminal half and a C-terminal half, delivery them separately, and then allow their colocalization to reform the complete protein (or fusion protein as the case may be) within the cell. Separate halves of a protein or a fusion protein may each comprise a split-intein tag to facilitate the reformation of the complete protein or fusion protein by the mechanism of protein trans splicing.

[0340] Protein trans-splicing, catalyzed by split inteins, provides an entirely enzymatic method for protein ligation. A split-intein is essentially a contiguous intein (e.g. a mini-intein) split into two pieces named N-intein and C-intein, respectively. The N-intein and C-intein of a split intein can associate non-covalently to form an active intein and catalyze the splicing reaction essentially in same way as a contiguous intein does. Split inteins have been found in nature and also engineered in laboratories. As used herein, the term “split intein” refers to any intein in which one or more peptide bond breaks exists between the N-terminal and C-terminal amino acid sequences such that the N-terminal and C-terminal sequences become separate molecules that can non-covalently reassociate, or reconstitute, into an intein that is functional for trans-splicing reactions. Any catalytically active intein, or fragment thereof, may be used to derive a split intein for use in the methods of the invention. For example, in one aspect the split intein may be derived from a eukaryotic intein. In another aspect, the split intein may be derived from a bacterial intein. In another aspect, the split intein may be derived from an archaeal intein. Preferably, the split intein so-derived will possess only the amino acid sequences essential for catalyzing trans-splicing reactions.

[0341] As used herein, the “N-terminal split intein (In)” refers to any intein sequence that comprises an N-terminal amino acid sequence that is functional for trans-splicing reactions. An In thus also comprises a sequence that is spliced out when trans-splicing occurs. An In can comprise a sequence that is a modification of the N-terminal portion of a naturally occurring intein sequence. For example, an In can comprise additional amino acid residues and/or mutated residues so long as the inclusion of such additional and/or mutated residues does not render the In non-functional in trans-splicing. Preferably, the inclusion of the additional and/or mutated residues improves or enhances the trans-splicing activity of the In.

[0342] As used herein, the “C-terminal split intein (Ic)” refers to any intein sequence that comprises a C-terminal amino acid sequence that is functional for trans-splicing reactions. In one aspect, the Ic comprises 4 to 7 contiguous amino acid residues, at least 4 amino acids of which are from the last β-strand of the intein from which it was derived. An Ic thus also comprises a sequence that is spliced out when trans-splicing occurs. An Ic can comprise a sequence that is a modification of the C-terminal portion of a naturally occurring intein sequence. For example, an Ic can comprise additional amino acid residues and/or mutated residues so long as the inclusion of such additional and/or mutated residues does not render the In non-functional in trans-splicing. Preferably, the inclusion of the additional and/or mutated residues improves or enhances the trans-splicing activity of the Ic.

[0343] In some embodiments of the invention, a peptide linked to an Ic or an In can comprise an additional chemical moiety including, among others, fluorescence groups, biotin, polyethylene glycol (PEG), amino acid analogs, unnatural amino acids, phosphate groups, glycosyl groups, radioisotope labels, and pharmaceutical molecules. In other embodiments, a peptide linked to an Ic can comprise one or more chemically reactive groups including, among others, ketone, aldehyde, Cys residues and Lys residues. The N-intein and C-intein of a split intein can associate non-covalently to form an active intein and catalyze the splicing reaction when an “intein-splicing polypeptide (ISP)” is present. As used herein, “intein-splicing polypeptide (ISP)” refers to the portion of the amino acid sequence of a split intein that remains when the Ic, In, or both, are removed from the split intein. In certain embodiments, the In comprises the ISP. In another embodiment, the Ic comprises the ISP. In yet another embodiment, the ISP is a separate peptide that is not covalently linked to In nor to Ic.

[0344] Split inteins may be created from contiguous inteins by engineering one or more split sites in the unstructured loop or intervening amino acid sequence between the −12 conserved beta-strands found in the structure of mini-inteins. Some flexibility in the position of the split site within regions between the beta-strands may exist, provided that creation of the split will not disrupt the structure of the intein, the structured beta-strands in particular, to a sufficient degree that protein splicing activity is lost.

[0345] In protein trans-splicing, one precursor protein consists of an N-extein part followed by the N-intein, another precursor protein consists of the C-intein followed by a C-extein part, and a trans-splicing reaction (catalyzed by the N- and C-inteins together) excises the two intein sequences and links the two extein sequences with a peptide bond. Protein trans-splicing, being an enzymatic reaction, can work with very low (e.g. micromolar) concentrations of proteins and can be carried out under physiological conditions.

[0346] Exemplary sequences are as follows:

| NAME | SEQUENCE OF LIGAND-DEPENDENT INTEIN |
|---|---|
| 2-4 INTEIN: | CLAEGTRIFDPVTGTTHRIEDVVDGRKPIHVVAAAKDGTLLARPVVSWFDQGTRDVIGLRIAGGAIV |
| | WATPDHKVLTEYGWRAAGELRKGDRVAGPGGSGNSLALSLTADQMVSALLDAEPPILYSEYDPTSPF |
| | SEASMMGLLTNLADRELVHMINWAKRVPGFVDLTLHDQAHLLECAWLEILMIGLVWRSMEHPGKLLF |
| | APNLLLDRNQGKCVEGMVEIFDMLLATSSRFRMMNLQGEEFVCLKSIILLNSGVYTFLSSTLKSLEE |
| | KDHIHRALDKITDTLIHLMAKAGLTLQQQHQRLAQLLLILSHIRHMSNKGMEHLYSMKYKNVVPLYD |
| | LLLEMLDAHRLHAGGSGASRVQAFADALDDKFLHDMLAEELRYSVIREVLPTRRARTFDLEVEELHT |
| | LVAEGVVVHNC (SEQ ID NO: 23) |
| 3-2 INTEIN | CLAEGTRIFDPVTGTTHRIEDVVDGRKPIHVVAVAKDGTLLARPVVSWFDQGTRDVIGLRIAGGAIV |
| | WATPDHKVLTEYGWRAAGELRKGDRVAGPGGSGNSLALSLTADQMVSALLDAEPPILYSEYDPTSPF |
| | SEASMMGLLTNLADRELVHMINWAKRVPGFVDLTLHDQAHLLECAWLEILMIGLVWRSMEHPGKLLF |
| | APNLLLDRNQGKCVEGMVEIFDMLLATSSRFRMMNLQGEEFVCLKSIILLNSGVYTFLSSTLKSLEE |
| | KDHIHRALDKITDTLIHLMAKAGLTLQQQHQRLAQLLLILSHIRHMSNKGMEHLYSMKYTNVVPLYD |
| | LLLEMLDAHRLHAGGSGASRVQAFADALDDKFLHDMLAEELRYSVIREVLPTRRARTFDLEVEELHT |
| | LVAEGVVVHNC (SEQ ID NO: 24) |
| 30R3-1 INTEIN | CLAEGTRIFDPVTGTTHRIEDVVDGRKPIHVVAAAKDGTLLARPVVSWFDQGTRDVIGLRIAGGATV |
| | WATPDHKVLTEYGWRAAGELRKGDRVAGPGGSGNSLALSLTADQMVSALLDAEPPIPYSEYDPTSPF |
| | SEASMMGLLTNLADRELVHMINWAKRVPGFVDLTLHDQAHLLECAWLEILMIGLVWRSMEHPGKLLF |
| | APNLLLDRNQGKCVEGMVEIFDMLLATSSRFRMMNLQGEEFVCLKSIILLNSGVYTFLSSTLKSLEE |
| | KDHIHRALDKITDTLIHLMAKAGLTLQQQHQRLAQLLLILSHIRHMSNKGMEHLYSMKYKNVVPLYD |
| | LLLEMLDAHRLHAGGSGASRVQAFADALDDKFLHDMLAEGLRYSVIREVLPTRRARTFDLEVEELHT |
| | LVAEGVVVHNC (SEQ ID NO: 25) |
| 30R3-2 INTEIN | CLAEGTRIFDPVTGTTHRIEDVVDGRKPIHVVAAAKDGTLLARPVVSWFDQGTRDVIGLRIAGGATV |
| | WATPDHKVLTEYGWRAAGELRKGDRVAGPGGSGNSLALSLTADQMVSALLDAEPPILYSEYDPTSPF |
| | SEASMMGLLTNLADRELVHMINWAKRVPGFVDLTLHDQAHLLECAWLEILMIGLVWRSMEHPGKLLF |
| | APNLLLDRNQGKCVEGMVEIFDMLLATSSRFRMMNLQGEEFVCLKSIILLNSGVYTFLSSTLKSLEE |
| | KDHIHRALDKITDTLIHLMAKAGLTLQQQHQRLAQLLLILSHIRHMSNKGMEHLYSMKYKNVVPLYD |
| | LLLEMLDAHRLHAGGSGASRVQAFADALDDKFLHDMLAEELRYSVIREVLPTRRARTFDLEVEELHT |
| | LVAEGVVVHNC (SEQ ID NO: 26) |
| 30R3-3 INTEIN | CLAEGTRIFDPVTGTTHRIEDVVDGRKPIHVVAAAKDGTLLARPVVSWFDQGTRDVIGLRIAGGATV |
| | WATPDHKVLTEYGWRAAGELRKGDRVAGPGGSGNSLALSLTADQMVSALLDAEPPIPYSEYDPTSPF |
| | SEASMMGLLTNLADRELVHMINWAKRVPGFVDLTLHDQAHLLECAWLEILMIGLVWRSMEHPGKLLF |
| | APNLLLDRNQGKCVEGMVEIFDMLLATSSRFRMMNLQGEEFVCLKSIILLNSGVYTFLSSTLKSLEE |
| | KDHIHRALDKITDTLIHLMAKAGLTLQQQHQRLAQLLLILSHIRHMSNKGMEHLYSMKYKNVVPLYD |
| | LLLEMLDAHRLHAGGSGASRVQAFADALDDKFLHDMLAEELRYSVIREVLPTRRARTFDLEVEELHT |
| | LVAEGVVVHNC (SEQ ID NO: 27) |
| 37R3-1 INTEIN | CLAEGTRIFDPVTGTTHRIEDWDGRKPIHVVAAAKDGTLLARPVVSWFDQGTRDVIGLRIAGGATV |
| | WATPDHKVLTEYGWRAAGELRKGDRVAGPGGSGNSLALSLTADQMVSALLDAEPPILYSEYNPTSPF |
| | SEASMMGLLTNLADRELVHMINWAKRVPGFVDLTLHDQAHLLERAWLEILMIGLVWRSMEHPGKLLF |
| | APNLLLDRNQGKCVEGMVEIFDMLLATSSRFRMMNLQGEEFVCLKSIILLNSGVYTFLSSTLKSLEE |
| | KDHIHRALDKITDTLIHLMAKAGLTLQQQHQRLAQLLLILSHIRHMSNKGMEHLYSMKYKNVVPLYD |
| | LLLEMLDAHRLHAGGSGASRVQAFADALDDKFLHDMLAEGLRYSVIREVLPTRRARTFDLEVEELHT |
| | LVAEGVVVHNC ((SEQ ID NO: 28) |
| 37R3-2 INTEIN | CLAEGTRIFDPVTGTTHRIEDVVDGRKPIHVVAAAKDGTLLARPVVSWFDQGTRDVIGLRIAGGAIV |
| | WATPDHKVLTEYGWRAAGELRKGDRVAGPGGSGNSLALSLTADQMVSALLDAEPPILYSEYDPTSPF |
| | SEASMMGLLTNLADRELVHMINWAKRVPGFVDLTLHDQAHLLERAWLEILMIGLVWRSMEHPGKLLF |
| | APNLLLDRNQGKCVEGMVEIFDMLLATSSRFRMMNLQGEEFVCLKSIILLNSGVYTFLSSTLKSLEE |
| | KDHIHRALDKITDTLIHLMAKAGLTLQQQHQRLAQLLLILSHIRHMSNKGMEHLYSMKYKNVVPLYD |
| | LLLEMLDAHRLHAGGSGASRVQAFADALDDKFLHDMLAEGLRYSVIREVLPTRRARTFDLEVEELHT |
| | LVAEGVVVHNC (SEQ ID NO: 29) |
| 37R3-3 INTEIN | CLAEGTRIFDPVTGTTHRIEDVVDGRKPIHVVAVAKDGTLLARPVVSWFDQGTRDVIGLRIAGGATV |
| | WATPDHKVLTEYGWRAAGELRKGDRVAGPGGSGNSLALSLTADQMVSALLDAEPPILYSEYDPTSPF |
| | SEASMMGLLTNLADRELVHMINWAKRVPGFVDLTLHDQAHLLERAWLEILMIGLVWRSMEHPGKLLF |
| | APNLLLDRNQGKCVEGMVEIFDMLLATSSRFRMMNLQGEEFVCLKSIILLNSGVYTFLSSTLKSLEE |
| | KDHIHRALDKITDTLIHLMAKAGLTLQQQHQRLAQLLLILSHIRHMSNKGMEHLYSMKYKNVVPLYD |
| | LLLEMLDAHRLHAGGSGASRVQAFADALDDKFLHDMLAEELRYSVIREVLPTRRARTFDLEVEELHT |
| | LVAEGVVVHNC (SEQ ID NO: 30) |

[0347] Although inteins are most frequently found as a contiguous domain, some exist in a naturally split form. In this case, the two fragments are expressed as separate polypeptides and must associate before splicing takes place, so-called protein trans-splicing.

[0348] An exemplary split intein is the Ssp DnaE intein, which comprises two subunits, namely, DnaE-N and DnaE-C. The two different subunits are encoded by separate genes, namely dnaE-n and dnaE-c, which encode the DnaE-N and DnaE-C subunits, respectively. DnaE is a naturally occurring split intein in Synechocytis sp. PCC6803 and is capable of directing trans-splicing of two separate proteins, each comprising a fusion with either DnaE-N or DnaE-C.

[0349] Additional naturally occurring or engineered split-intein sequences are known in the or can be made from whole-intein sequences described herein or those available in the art. Examples of split-intein sequences can be found in Stevens et al., “A promiscuous split intein with expanded protein engineering applications,” PNAS, 2017, Vol. 114: 8538-8543; Iwai et al., “Highly efficient protein trans-splicing by a naturally split DnaE intein from Nostc punctiforme, FEBS Lett, 580: 1853-1858, each of which are incorporated herein by reference. Additional split intein sequences can be found, for example, in WO 2013/045632, WO 2014/055782, WO 2016/069774, and EP2877490, the contents each of which are incorporated herein by reference.

[0350] In addition, protein splicing in trans has been described in vivo and in vitro (Shingledecker, et al., Gene 207:187 (1998), Southworth, et al., EMBO J. 17:918 (1998); Mills, et al., Proc. Natl. Acad. Sci. USA, 95:3543-3548 (1998); Lew, et al., J. Biol. Chem., 273:15887-15890 (1998); Wu, et al., Biochim. Biophys. Acta 35732:1 (1998b), Yamazaki, et al., J. Am. Chem. Soc. 120:5591 (1998), Evans, et al., J. Biol. Chem. 275:9091 (2000); Otomo, et al., Biochemistry 38:16040-16044 (1999); Otomo, et al., J. Biolmol. NMR 14:105-114 (1999); Scott, et al., Proc. Natl. Acad. Sci. USA 96:13638-13643 (1999)) and provides the opportunity to express a protein as to two inactive fragments that subsequently undergo ligation to form a functional product.

[0351] (5) RNA-Protein Recruitment System

[0352] In various embodiments, two separate protein domains (e.g., a Cas9 domain and a cytidine deaminase domain) may be colocalized to one another to form a functional complex (akin to the function of a fusion protein comprising the two separate protein domains) by using an “RNA-protein recruitment system,” such as the “MS2 tagging technique.” Such systems generally tag one protein domain with an “RNA-protein interaction domain” (aka “RNA-protein recruitment domain”) and the other with an “RNA-binding protein” that specifically recognizes and binds to the RNA-protein interaction domain, e.g., a specific hairpin structure. These types of systems can be leveraged to colocalize the domains of a base editor, as well as to recruitment additional functionalities to a base editor, such as a UGI domain. In one example, the MS2 tagging technique is based on the natural interaction of the MS2 bacteriophage coat protein (“MCP” or “MS2cp”) with a stem-loop or hairpin structure present in the genome of the phage, i.e., the “MS2 hairpin.” In the case of the MS2 hairpin, it is recognized and bound by the MS2 bacteriophage coat protein (MCP). Thus, in one exemplarly scenario a deaminase-MS2 fusion can recruit a Cas9-MCP fusion.

[0353] A review of other modular RNA-protein interaction domains are described in the art, for example, in Johansson et al., “RNA recognition by the MS2 phage coat protein,” Sem Virol., 1997, Vol. 8(3): 176-185; Delebecque et al., “Organization of intracellular reactions with rationally designed RNA assemblies,” Science, 2011, Vol. 333: 470-474; Mali et al., “Cas9 transcriptional activators for target specificity screening and paired nickases for cooperative genome engineering,” Nat. Biotechnol., 2013, Vol. 31: 833-838; and Zalatan et al., “Engineering complex synthetic transcriptional programs with CRISPR RNA scaffolds,” Cell, 2015, Vol. 160: 339-350, each of which are incorporated herein by reference in their entireties. Other systems include the PP7 hairpin, which specifically recruits the PCP protein, and the “corn” hairpin, which specifically recruits the Com protein. See Zalatan et al.

[0354] The nucleotide sequence of the MS2 hairpin (or equivalently referred to as the “MS2 aptamer”) is: GCCAACATGAGGATCACCCATGTCTGCAGGGCC (SEQ ID NO: 31).

[0355] The amino acid sequence of the MCP or MS2cp is:

(SEQ ID NO: 32)
GSASNFTQFVLVDNGGTGDVTVAPSNFANGVAEWISSNSRSQAYKVTCSV
RQSSAQNRKYTIKVEVPKVATQTVGGEELPVAGWRSYLNMELTIPIFATN
SDCELIVKAMQGLLKDGNPIPSAIAANSGIY.

### Base Editors

[0356] In various aspects, the instant specification provides base editors and methods of using the same to treat a cancer (e.g., glioblastoma or melanoma). In particular, the inventors surprisingly found that adenosine base editors could be used to efficiently mutate or substitute specific residues of the STAT3 gene (e.g., Y705 and S727) both in vitro and in vivo, which is useful for the treatment of certain cancers (e.g., glioblastoma and melanoma).

[0357] In certain aspects, methods provided herein utilize base editors (e.g., adenosine base editors) known in the art in order to make one or more desired nucleic acid modifications. The state of the art has described numerous base editors as of this filing. The methods and approaches herein described may be applied to any previously known base editor, or to base editors that may be developed in the future. Exemplary base editors that may be used in accordance with the present disclosure include those described in the following references and/or patent publications, each of which are incorporated by reference in their entireties: (a) PCT/US2014/070038 (published as WO2015/089406, Jun. 18, 2015) and its equivalents in the US or around the world; (b) PCT/US2016/058344 (published as WO2017/070632, Apr. 27, 2017) and its equivalents in the US or around the world; (c) PCT/US2016/058345 (published as WO2017/070633, Apr. 27, 2017) and its equivalent in the US or around the world; (d) PCT/US2017/045381 (published as WO2018/027078, Feb. 8, 2018) and its equivalents in the US or around the world; (e) PCT/US2017/056671 (published as WO2018/071868, Apr. 19, 2018) and its equivalents in the US or around the world; PCT/2017/048390 (WO2017/048390, Mar. 23, 2017) and its equivalents in the US or around the world; (f) PCT/US2017/068114 (not published) and its equivalents in the US or around the world; (g) PCT/US2017/068105 (not published) and its equivalents in the US or around the world; (h) PCT/US2017/046144 (WO2018/031683, Feb. 15, 2018) and its equivalents in the US or around the world; (i) PCT/US2018/024208 (not published) and its equivalents in the US or around the world; (j) PCT/2018/021878 (WO2018/021878, Feb. 1, 2018) and its equivalents in the US and around the world; (k) Komor, A. C., Kim, Y. B., Packer, M. S., Zuris, J. A. & Liu, D. R. Programmable editing of a target base in genomic DNA without double-stranded DNA cleavage. Nature 533, 420-(2016); (1) Gaudelli, N. M. et al. Programmable base editing of A.T to G.C in genomic DNA without DNA cleavage. Nature 551, 464-(2017); (m) Gehrke, et al. An APOBEC3A-Cas9 base editor with minimized bystander and off-target activities. Nat. Biotechnol. 36(10), 977-(2018); (n) Lee, S. et al. Single C-to-T substitution using engineered APOBEC3G-nCas9 base editors with minimum genome- and transcriptome-wide off-target effects. Science Advances 6, eaba1773 (2020); (o) Gaudelli, N. M. et al. “Directed Evolution of Adenine Base Editors with Increased Activity and Therapeutic Application.” Nat. Biotechnol. 38, 892-900 (2020); (p) Yu, Y. et al. “Next-generation cytosine base editors with minimized unguided DNA and RNA off-target events and high on-target activity.” Nat. Commun. 11 (2020); and (q) any of the references listed in this specification entitled “References” and which reports or describes a base editor known in the art.

[0358] In various aspects, the improved or modified base editors described herein have the following generalized structure:
[0359] A-B-C,
   wherein “A” is a Cas moiety or napDNA/RNAbp, “B” is nucleic acid effector domain (e.g., an adenosine deaminase), and “C” is one or more additional functional moieties, such as nuclear localization signal (NLS) domains or UGI domains. In addition, the “-” represents a linker that covalently joins moieties A, B, and C. The linkers can be any suitable type (e.g., amino acid sequences or other biopolymers, or synthetic chemical linkages in the case where the moieties are bioconjugated to one another) or length. In addition, a functional base editor of the invention would also include one or more “R” or guide sequences (e.g., guide RNA in the case of a Cas9 or Cas9 equivalent) in order to carry out the DNA/RNA-programmable functionality of base editors for targeting specific sites to be corrected.

[0360] The order of linkage of the moieties is not meant to be particularly limiting so long as the particular arrangement of the elements of moieties produces a functional base editor. That is, the improved base editors of the invention may also include editors represented by the following structures:
[0361] B-A-C;
[0362] B-C-A;
[0363] C-B-A;
[0364] C-A-B; and
[0365] A-C-B.

[0366] In some embodiments, the base editors provided herein can be made as a recombinant fusion protein comprising one or more protein domains, thereby generating a base editor. In certain embodiments, the base editors provided herein comprise one or more features that improve the base editing activity (e.g., efficiency, selectivity, and/or specificity) of the base editor proteins. For example, the base editor proteins provided herein may comprise a Cas9 domain that has reduced nuclease activity. In some embodiments, the base editor proteins provided herein may have a Cas9 domain that does not have nuclease activity (dCas9), or a Cas9 domain that cuts one strand of a duplexed DNA molecule, referred to as a Cas9 nickase (nCas9). Without wishing to be bound by any particular theory, the presence of the catalytic residue (e.g., H840) maintains the activity of the Cas9 to cleave the non-edited (e.g., non-deaminated) strand containing a T opposite the targeted A. Mutation of the catalytic residue (e.g., D10 to A10) of Cas9 prevents cleavage of the edited strand containing the targeted A residue. Such Cas9 variants are able to generate a single-strand DNA break (nick) at a specific location based on the gRNA-defined target sequence, leading to repair of the non-edited strand, ultimately resulting in a T to C change on the non-edited strand.

[0367] In particular, the disclosure provides adenosine base editors that can be used to mutate the Y705 or 5727 in a STAT3 gene, generating STAT3 protein that cannot be phosphorylated (e.g., cannot be activated) to treat a cancer (e.g., glioblastoma or melanoma). Exemplary domains used in base editing fusion proteins, including adenosine deaminases, napDNA/RNAbp (e.g., Cas9), and nuclear localization sequences (NLSs) are described in further detail below.

| | | SEQ |
|---|---|---|
| | | ID |
| Description | Sequence | NO: |
| signal | MAQWNQLQQLDTRYLEQLHQLYSDSFPMELRQFLAPWIESQDWAYAASKESHATLVFH | 33 |
| transducer and | NLLGEIDQQYSRFLQESNVLYQHNLRRIKQFLQSRYLEKPMEIARIVARCLWEESRLL | |
| activator of | QTAATAAQQGGQANHPTAAVVTEKQQMLEQHLQDVRKRVQDLEQKMKVVENLQDDFDF | |
| transcription 3 | NYKTLKSQGDMQDLNGNNQSVTRQKMQQLEQMLTALDQMRRSIVSELAGLLSAMEYVQ | |
| isoform 1 [Homo | KTLTDEELADWKRRQQIACIGGPPNICLDRLENWITSLAESQLQTRQQIKKLEELQQK | |
| sapiens] | VSYKGDPIVQHRPMLEERIVELFRNLMKSAFVVERQPCMPMHPDRPLVIKTGVQFTTK | |
| (NP_644805.1) | VRLLVKFPELNYQLKIKVCIDKDSGDVAALRGSRKFNILGTNTKVMNMEESNNGSLSA | |
| | EFKHLTLREQRCGNGGRANCDASLIVTEELHLITFETEVYHQGLKIDLETHSLPVVVI | |
| | SNICQMPNAWASILWYNMLTNNPKNVNFFTKPPIGTWDQVAEVLSWQFSSTTKRGLSI | |
| | EQLTTLAEKLLGPGVNYSGCQITWAKFCKENMAGKGFSFWVWLDNIIDLVKKYILALW | |
| | NEGYIMGFISKERERAILSTKPPGTFLLRFSESSKEGGVTFTWVEKDISGKTQIQSVE | |
| | PYTKQQLNNMSFAEIIMGYKIMDATNILVSPLVYLYPDIPKEEAFGKYCRPESQEHPE | |
| | ADPGSAAPYLKTKFICVTPTTCSNTIDLPMSPRTLDSLMQFGNNGEGAEPSAGGQFES | |
| | LTFDMELTSECATSPM | |
| Homo sapiens | GGTTTCCGGAGCTGCGGCGGCGCAGACTGGGAGGGGGAGCCGGGGGTTCCGACGTCGC | 34 |
| signal | AGCCGAGGGAACAAGCCCCAACCGGATCCTGGACAGGCACCCCGGCTTGGCGCTGTCT | |
| transducer and | CTCCCCCTCGGCTCGGAGAGGCCCTTCGGCCTGAGGGAGCCTCGCCGCCCGTCCCCGG | |
| activator of | CACACGCGCAGCCCCGGCCTCTCGGCCTCTGCCGGAGAAACAGTTGGGACCCCTGATT | |
| transcription 3 | TTAGCAGGATGGCCCAATGGAATCAGCTACAGCAGCTTGACACACGGTACCTGGAGCA | |
| (STAT3), | GCTCCATCAGCTCTACAGTGACAGCTTCCCAATGGAGCTGCGGCAGTTTCTGGCCCCT | |
| transcript | TGGATTGAGAGTCAAGATTGGGCATATGCGGCCAGCAAAGAATCACATGCCACTTTGG | |
| variant 1 | TGTTTCATAATCTCCTGGGAGAGATTGACCAGCAGTATAGCCGCTTCCTGCAAGAGTC | |
| (NM_139276.2) | GAATGTTCTCTATCAGCACAATCTACGAAGAATCAAGCAGTTTCTTCAGAGCAGGTAT | |
| | CTTGAGAAGCCAATGGAGATTGCCCGGATTGTGGCCCGGTGCCTGTGGGAAGAATCAC | |
| | GCCTTCTACAGACTGCAGCCACTGCGGCCCAGCAAGGGGGCCAGGCCAACCACCCCAC | |
| | AGCAGCCGTGGTGACGGAGAAGCAGCAGATGCTGGAGCAGCACCTTCAGGATGTCCGG | |
| | AAGAGAGTGCAGGATCTAGAACAGAAAATGAAAGTGGTAGAGAATCTCCAGGATGACT | |
| | TTGATTTCAACTATAAAACCCTCAAGAGTCAAGGAGACATGCAAGATCTGAATGGAAA | |
| | CAACCAGTCAGTGACCAGGCAGAAGATGCAGCAGCTGGAACAGATGCTCACTGCGCTG | |
| | GACCAGATGCGGAGAAGCATCGTGAGTGAGCTGGCGGGGCTTTTGTCAGCGATGGAGT | |
| | ACGTGCAGAAAACTCTCACGGACGAGGAGCTGGCTGACTGGAAGAGGCGGCAACAGAT | |
| | TGCCTGCATTGGAGGCCCGCCCAACATCTGCCTAGATCGGCTAGAAAACTGGATAACG | |
| | TCATTAGCAGAATCTCAACTTCAGACCCGTCAACAAATTAAGAAACTGGAGGAGTTGC | |
| | AGCAAAAAGTTTCCTACAAAGGGGACCCCATTGTACAGCACCGGCCGATGCTGGAGGA | |
| | GAGAATCGTGGAGCTGTTTAGAAACTTAATGAAAAGTGCCTTTGTGGTGGAGCGGCAG | |
| | CCCTGCATGCCCATGCATCCTGACCGGCCCCTCGTCATCAAGACCGGCGTCCAGTTCA | |
| | CTACTAAAGTCAGGTTGCTGGTCAAATTCCCTGAGTTGAATTATCAGCTTAAAATTAA | |
| | AGTGTGCATTGACAAAGACTCTGGGGACGTTGCAGCTCTCAGAGGATCCCGGAAATTT | |
| | AACATTCTGGGCACAAACACAAAAGTGATGAACATGGAAGAATCCAACAACGGCAGCC | |
| | TCTCTGCAGAATTCAAACACTTGACCCTGAGGGAGCAGAGATGTGGGAATGGGGGCCG | |
| | AGCCAATTGTGATGCTTCCCTGATTGTGACTGAGGAGCTGCACCTGATCACCTTTGAG | |
| | ACCGAGGTGTATCACCAAGGCCTCAAGATTGACCTAGAGACCCACTCCTTGCCAGTTG | |
| | TGGTGATCTCCAACATCTGTCAGATGCCAAATGCCTGGGCGTCCATCCTGTGGTACAA | |
| | CATGCTGACCAACAATCCCAAGAATGTAAACTTTTTTACCAAGCCCCCAATTGGAACC | |
| | TGGGATCAAGTGGCCGAGGTCCTGAGCTGGCAGTTCTCCTCCACCACCAAGCGAGGAC | |
| | TGAGCATCGAGCAGCTGACTACACTGGCAGAGAAACTCTTGGGACCTGGTGTGAATTA | |
| | TTCAGGGTGTCAGATCACATGGGCTAAATTTTGCAAAGAAAACATGGCTGGCAAGGGC | |
| | TTCTCCTTCTGGGTCTGGCTGGACAATATCATTGACCTTGTGAAAAAGTACATCCTGG | |
| | CCCTTTGGAACGAAGGGTACATCATGGGCTTTATCAGTAAGGAGCGGGAGCGGGCCAT | |
| | CTTGAGCACTAAGCCTCCAGGCACCTTCCTGCTAAGATTCAGTGAAAGCAGCAAAGAA | |
| | GGAGGCGTCACTTTCACTTGGGTGGAGAAGGACATCAGCGGTAAGACCCAGATCCAGT | |
| | CCGTGGAACCATACACAAAGCAGCAGCTGAACAACATGTCATTTGCTGAAATCATCAT | |
| | GGGCTATAAGATCATGGATGCTACCAATATCCTGGTGTCTCCACTGGTCTATCTCTAT | |
| | CCTGACATTCCCAAGGAGGAGGCATTCGGAAAGTATTGTCGGCCAGAGAGCCAGGAGC | |
| | ATCCTGAAGCTGACCCAGGTAGCGCTGCCCCATACCTGAAGACCAAGTTTATCTGTGT | |
| | GACACCAACGACCTGCAGCAATACCATTGACCTGCCGATGTCCCCCCGCACTTTAGAT | |
| | TCATTGATGCAGTTTGGAAATAATGGTGAAGGTGCTGAACCCTCAGCAGGAGGGCAGT | |
| | TTGAGTCCCTCACCTTTGACATGGAGTTGACCTCGGAGTGCGCTACCTCCCCCATGTG | |
| | AGGAGCTGAGAACGGAAGCTGCAGAAAGATACGACTGAGGCGCCTACCTGCATTCTGC | |
| | CACCCCTCACACAGCCAAACCCCAGATCATCTGAAACTACTAACTTTGTGGTTCCAGA | |
| | TTTTTTTTAATCTCCTACTTCTGCTATCTTTGAGCAATCTGGGCACTTTTAAAAATAG | |
| | AGAAATGAGTGAATGTGGGTGATCTGCTTTTATCTAAATGCAAATAAGGATGTGTTCT | |
| | CTGAGACCCATGATCAGGGGATGTGGCGGGGGGTGGCTAGAGGGAGAAAAAGGAAATG | |
| | TCTTGTGTTGTTTTGTTCCCCTGCCCTCCTTTCTCAGCAGCTTTTTGTTATTGTTGTT | |
| | GTTGTTCTTAGACAAGTGCCTCCTGGTGCCTGCGGCATCCTTCTGCCTGTTTCTGTAA | |
| | GCAAATGCCACAGGCCACCTATAGCTACATACTCCTGGCATTGCACTTTTTAACCTTG | |
| | CTGACATCCAAATAGAAGATAGGACTATCTAAGCCCTAGGTTTCTTTTTAAATTAAGA | |
| | AATAATAACAATTAAAGGGCAAAAAACACTGTATCAGCATAGCCTTTCTGTATTTAAG | |
| | AAACTTAAGCAGCCGGGCATGGTGGCTCACGCCTGTAATCCCAGCACTTTGGGAGGCC | |
| | GAGGCGGATCATAAGGTCAGGAGATCAAGACCATCCTGGCTAACACGGTGAAACCCCG | |
| | TCTCTACTAAAAGTACAAAAAATTAGCTGGGTGTGGTGGTGGGCGCCTGTAGTCCCAG | |
| | CTACTCGGGAGGCTGAGGCAGGAGAATCGCTTGAACCTGAGAGGCGGAGGTTGCAGTG | |
| | AGCCAAAATTGCACCACTGCACACTGCACTCCATCCTGGGCGACAGTCTGAGACTCTG | |
| | TCTCAAAAAAAAAAAAAAAAAAAAGAAACTTCAGTTAACAGCCTCCTTGGTGCTTTAA | |
| | GCATTCAGCTTCCTTCAGGCTGGTAATTTATATAATCCCTGAAACGGGCTTCAGGTCA | |
| | AACCCTTAAGACATCTGAAGCTGCAACCTGGCCTTTGGTGTTGAAATAGGAAGGTTTA | |
| | AGGAGAATCTAAGCATTTTAGACTTTTTTTTATAAATAGACTTATTTTCCTTTGTAAT | |
| | GTATTGGCCTTTTAGTGAGTAAGGCTGGGCAGAGGGTGCTTACAACCTTGACTCCCTT | |
| | TCTCCCTGGACTTGATCTGCTGTTTCAGAGGCTAGGTTGTTTCTGTGGGTGCCTTATC | |
| | AGGGCTGGGATACTTCTGATTCTGGCTTCCTTCCTGCCCCACCCTCCCGACCCCAGTC | |
| | CCCCTGATCCTGCTAGAGGCATGTCTCCTTGCGTGTCTAAAGGTCCCTCATCCTGTTT | |
| | GTTTTAGGAATCCTGGTCTCAGGACCTCATGGAAGAAGAGGGGGAGAGAGTTACAGGT | |
| | TGGACATGATGCACACTATGGGGCCCCAGCGACGTGTCTGGTTGAG | |
| | CTCAGGGAATATGGTTCTTAGCCAGTTTCTTGGTGATATCCAGTGGCACTTGTAATGG | |
| | CGTCTTCATTCAGTTCATGCAGGGCAAAGGCTTACTGATAAACTTGAGTCTGCCCTCG | |
| | TATGAGGGTGTATACCTGGCCTCCCTCTGAGGCTGGTGACTCCTCCCTGCTGGGGCCC | |
| | CACAGGTGAGGCAGAACAGCTAGAGGGCCTCCCCGCCTGCCCGCCTTGGCTGGCTAGC | |
| | TCGCCTCTCCTGTGCGTATGGGAACACCTAGCACGTGCTGGATGGGCTGCCTCTGACT | |
| | CAGAGGCATGGCCGGATTTGGCAACTCAAAACCACCTTGCCTCAGCTGATCAGAGTTT | |
| | CTGTGGAATTCTGTTTGTTAAATCAAATTAGCTGGTCTCTGAATTAAGGGGGAGACGA | |
| | CCTTCTCTAAGATGAACAGGGTTCGCCCCAGTCCTCCTGCCTGGAGACAGTTGATGTG | |
| | TCATGCAGAGCTCTTACTTCTCCAGCAACACTCTTCAGTACATAATAAGCTTAACTGA | |
| | TAAACAGAATATTTAGAAAGGTGAGACTTGGGCTTACCATTGGGTTTAAATCATAGGG | |
| | ACCTAGGGCGAGGGTTCAGGGCTTCTCTGGAGCAGATATTGTCAAGTTCATGGCCTTA | |
| | GGTAGCATGTATCTGGTCTTAACTCTGATTGTAGCAAAAGTTCTGAGAGGAGCTGAGC | |
| | CCTGTTGTGGCCCATTAAAGAACAGGGTCCTCAGGCCCTGCCCGCTTCCTGTCCACTG | |
| | CCCCCTCCCCATCCCCAGCCCAGCCGAGGGAATCCCGTGGGTTGCTTACCTACCTATA | |
| | AGGTGGTTTATAAGCTGCTGTCCTGGCCACTGCATTCAAATTCCAATGTGTACTTCAT | |
| | AGTGTAAAAATTTATATTATTGTGAGGTTTTTTGTCTTTTTTTTTTTTTTTTTTTTTT | |
| | GGTATATTGCTGTATCTACTTTAACTTCCAGAAATAAACGTTATATAGGAACCGTAAA | |
| | AA | |
| signal | MAQWNQLQQLDTRYLEQLHQLYSDSFPMELRQFLAPWIESQDWAYAASKESHATLVFH | 35 |
| transducer and | NLLGEIDQQYSRFLQESNVLYQHNLRRIKQFLQSRYLEKPMEIARIVARCLWEESRLL | |
| activator of | QTAATAAQQGGQANHPTAAVVTEKQQMLEQHLQDVRKRVQDLEQKMKVVENLQDDFDF | |
| transcription 3 | NYKTLKSQGDMQDLNGNNQSVTRQKMQQLEQMLTALDQMRRSIVSELAGLLSAMEYVQ | |
| isoform 2 [Homo | KTLTDEELADWKRRQQIACIGGPPNICLDRLENWITSLAESQLQTRQQIKKLEELQQK | |
| sapiens] | VSYKGDPIVQHRPMLEERIVELFRNLMKSAFVVERQPCMPMHPDRPLVIKTGVQFTTK | |
| (NP_003141.2) | VRLLVKFPELNYQLKIKVCIDKDSGDVAALRGSRKFNILGTNTKVMNMEESNNGSLSA | |
| | EFKHLTLREQRCGNGGRANCDASLIVTEELHLITFETEVYHQGLKIDLETHSLPVVVI | |
| | SNICQMPNAWASILWYNMLTNNPKNVNFFTKPPIGTWDQVAEVLSWQFSSTTKRGLSI | |
| | EQLTTLAEKLLGPGVNYSGCQITWAKFCKENMAGKGFSFWVWLDNIIDLVKKYILALW | |
| | NEGYIMGFISKERERAILSTKPPGTFLLRFSESSKEGGVTFTWVEKDISGKTQIQSVE | |
| | PYTKQQLNNMSFAEIIMGYKIMDATNILVSPLVYLYPDIPKEEAFGKYCRPESQEHPE | |
| | ADPGAAPYLKTKFICVTPTTCSNTIDLPMSPRTLDSLMQFGNNGEGAEPSAGGQFESL | |
| | TFDMELTSECATSPM | |
| Homo sapiens | GTCGCAGCCGAGGGAACAAGCCCCAACCGGATCCTGGACAGGCACCCCGGCTTGGCGC | 36 |
| signal | TGTCTCTCCCCCTCGGCTCGGAGAGGCCCTTCGGCCTGAGGGAGCCTCGCCGCCCGTC | |
| transducer and | CCCGGCACACGCGCAGCCCCGGCCTCTCGGCCTCTGCCGGAGAAACAGGATGGCCCAA | |
| activator of | TGGAATCAGCTACAGCAGCTTGACACACGGTACCTGGAGCAGCTCCATCAGCTCTACA | |
| transcription 3 | GTGACAGCTTCCCAATGGAGCTGCGGCAGTTTCTGGCCCCTTGGATTGAGAGTCAAGA | |
| (STAT3), | TTGGGCATATGCGGCCAGCAAAGAATCACATGCCACTTTGGTGTTTCATAATCTCCTG | |
| transcript | GGAGAGATTGACCAGCAGTATAGCCGCTTCCTGCAAGAGTCGAATGTTCTCTATCAGC | |
| variant 2 | ACAATCTACGAAGAATCAAGCAGTTTCTTCAGAGCAGGTATCTTGAGAAGCCAATGGA | |
| (NM_003150.4) | GATTGCCCGGATTGTGGCCCGGTGCCTGTGGGAAGAATCACGCCTTCTACAGACTGCA | |
| | GCCACTGCGGCCCAGCAAGGGGGCCAGGCCAACCACCCCACAGCAGCCGTGGTGACGG | |
| | AGAAGCAGCAGATGCTGGAGCAGCACCTTCAGGATGTCCGGAAGAGAGTGCAGGATCT | |
| | AGAACAGAAAATGAAAGTGGTAGAGAATCTCCAGGATGACTTTGATTTCAACTATAAA | |
| | ACCCTCAAGAGTCAAGGAGACATGCAAGATCTGAATGGAAACAACCAGTCAGTGACCA | |
| | GGCAGAAGATGCAGCAGCTGGAACAGATGCTCACTGCGCTGGACCAGATGCGGAGAAG | |
| | CATCGTGAGTGAGCTGGCGGGGCTTTTGTCAGCGATGGAGTACGTGCAGAAAACTCTC | |
| | ACGGACGAGGAGCTGGCTGACTGGAAGAGGCGGCAACAGATTGCCTGCATTGGAGGCC | |
| | CGCCCAACATCTGCCTAGATCGGCTAGAAAACTGGATAACGTCATTAGCAGAATCTCA | |
| | ACTTCAGACCCGTCAACAAATTAAGAAACTGGAGGAGTTGCAGCAAAAAGTTTCCTAC | |
| | AAAGGGGACCCCATTGTACAGCACCGGCCGATGCTGGAGGAGAGAATCGTGGAGCTGT | |
| | TTAGAAACTTAATGAAAAGTGCCTTTGTGGTGGAGCGGCAGCCCTGCATGCCCATGCA | |
| | TCCTGACCGGCCCCTCGTCATCAAGACCGGCGTCCAGTTCACTACTAAAGTCAGGTTG | |
| | CTGGTCAAATTCCCTGAGTTGAATTATCAGCTTAAAATTAAAGTGTGCATTGACAAAG | |
| | ACTCTGGGGACGTTGCAGCTCTCAGAGGATCCCGGAAATTTAACATTCTGGGCACAAA | |
| | CACAAAAGTGATGAACATGGAAGAATCCAACAACGGCAGCCTCTCTGCAGAATTCAAA | |
| | CACTTGACCCTGAGGGAGCAGAGATGTGGGAATGGGGGCCGAGCCAATTGTGATGCTT | |
| | CCCTGATTGTGACTGAGGAGCTGCACCTGATCACCTTTGAGACCGAGGTGTATCACCA | |
| | AGGCCTCAAGATTGACCTAGAGACCCACTCCTTGCCAGTTGTGGTGATCTCCAACATC | |
| | TGTCAGATGCCAAATGCCTGGGCGTCCATCCTGTGGTACAACATGCTGACCAACAATC | |
| | CCAAGAATGTAAACTTTTTTACCAAGCCCCCAATTGGAACCTGGGATCAAGTGGCCGA | |
| | GGTCCTGAGCTGGCAGTTCTCCTCCACCACCAAGCGAGGACTGAGCATCGAGCAGCTG | |
| | ACTACACTGGCAGAGAAACTCTTGGGACCTGGTGTGAATTATTCAGGGTGTCAGATCA | |
| | CATGGGCTAAATTTTGCAAAGAAAACATGGCTGGCAAGGGCTTCTCCTTCTGGGTCTG | |
| | GCTGGACAATATCATTGACCTTGTGAAAAAGTACATCCTGGCCCTTTGGAACGAAGGG | |
| | TACATCATGGGCTTTATCAGTAAGGAGCGGGAGCGGGCCATCTTGAGCACTAAGCCTC | |
| | CAGGCACCTTCCTGCTAAGATTCAGTGAAAGCAGCAAAGAAGGAGGCGTCACTTTCAC | |
| | TTGGGTGGAGAAGGACATCAGCGGTAAGACCCAGATCCAGTCCGTGGAACCATACACA | |
| | AAGCAGCAGCTGAACAACATGTCATTTGCTGAAATCATCATGGGCTATAAGATCATGG | |
| | ATGCTACCAATATCCTGGTGTCTCCACTGGTCTATCTCTATCCTGACATTCCCAAGGA | |
| | GGAGGCATTCGGAAAGTATTGTCGGCCAGAGAGCCAGGAGCATCCTGAAGCTGACCCA | |
| | GGCGCTGCCCCATACCTGAAGACCAAGTTTATCTGTGTGACACCAACGACCTGCAGCA | |
| | ATACCATTGACCTGCCGATGTCCCCCCGCACTTTAGATTCATTGATGCAGTTTGGAAA | |
| | TAATGGTGAAGGTGCTGAACCCTCAGCAGGAGGGCAGTTTGAGTCCCTCACCTTTGAC | |
| | ATGGAGTTGACCTCGGAGTGCGCTACCTCCCCCATGTGAGGAGCTGAGAACGGAAGCT | |
| | GCAGAAAGATACGACTGAGGCGCCTACCTGCATTCTGCCACCCCTCACACAGCCAAAC | |
| | CCCAGATCATCTGAAACTACTAACTTTGTGGTTCCAGATTTTTTTTAATCTCCTACTT | |
| | CTGCTATCTTTGAGCAATCTGGGCACTTTTAAAAATAGAGAAATGAGTGAATGTGGGT | |
| | GATCTGCTTTTATCTAAATGCAAATAAGGATGTGTTCTCTGAGACCCATGATCAGGGG | |
| | ATGTGGCGGGGGGTGGCTAGAGGGAGAAAAAGGAAATGTCTTGTGTTGTTTTGTTCCC | |
| | CTGCCCTCCTTTCTCAGCAGCTTTTTGTTATTGTTGTTGTTGTTCTTAGACAAGTGCC | |
| | TCCTGGTGCCTGCGGCATCCTTCTGCCTGTTTCTGTAAGCAAATGCCACAGGCCACCT | |
| | ATAGCTACATACTCCTGGCATTGCACTTTTTAACCTTGCTGACATCCAAATAGAAGAT | |
| | AGGACTATCTAAGCCCTAGGTTTCTTTTTAAATTAAGAAATAATAACAATTAAAGGGC | |
| | AAAAAACACTGTATCAGCATAGCCTTTCTGTATTTAAGAAACTTAAGCAGCCGGGCAT | |
| | GGTGGCTCACGCCTGTAATCCCAGCACTTTGGGAGGCCGAGGCGGATCATAAGGTCAG | |
| | GAGATCAAGACCATCCTGGCTAACACGGTGAAACCCCGTCTCTACTAAAAGTACAAAA | |
| | AATTAGCTGGGTGTGGTGGTGGGCGCCTGTAGTCCCAGCTACTCGGGAGGCTGAGGCA | |
| | GGAGAATCGCTTGAACCTGAGAGGCGGAGGTTGCAGTGAGCCAAAATTGCACCACTGC | |
| | ACACTGCACTCCATCCTGGGCGACAGTCTGAGACTCTGTCTCAAAAAAAAAAAAAAAA | |
| | AAAAGAAACTTCAGTTAACAGCCTCCTTGGTGCTTTAAGCATTCAGCTTCCTTCAGGC | |
| | TGGTAATTTATATAATCCCTGAAACGGGCTTCAGGTCAAACCCTTAAGACATCTGAAG | |
| | CTGCAACCTGGCCTTTGGTGTTGAAATAGGAAGGTTTAAGGAGAATCTAAGCATTTTA | |
| | GACTTTTTTTTATAAATAGACTTATTTTCCTTTGTAATGTATTGGCCTTTTAGTGAGT | |
| | AAGGCTGGGCAGAGGGTGCTTACAACCTTGACTCCCTTTCTCCCTGGACTTGATCTGC | |
| | TGTTTCAGAGGCTAGGTTGTTTCTGTGGGTGCCTTATCAGGGCTGGGATACTTCTGAT | |
| | TCTGGCTTCCTTCCTGCCCCACCCTCCCGACCCCAGTCCCCCTGATCCTGCTAGAGGC | |
| | ATGTCTCCTTGCGTGTCTAAAGGTCCCTCATCCTGTTTGTTTTAGGAATCCTGGTCTC | |
| | AGGACCTCATGGAAGAAGAGGGGGAGAGAGTTACAGGTTGGACATGATGCACACTATG | |
| | GGGCCCCAGCGACGTGTCTGGTTGAGCTCAGGGAATATGGTTCTTAGCCAGTTTCTTG | |
| | GTGATATCCAGTGGCACTTGTAATGGCGTCTTCATTCAGTTCATGCAGGGCAAAGGCT | |
| | TACTGATAAACTTGAGTCTGCCCTCGTATGAGGGTGTATACCTGGCCTCCCTCTGAGG | |
| | CTGGTGACTCCTCCCTGCTGGGGCCCCACAGGTGAGGCAGAACAGCTAGAGGGCCTCC | |
| | CCGCCTGCCCGCCTTGGCTGGCTAGCTCGCCTCTCCTGTGCGTATGGGAACACCTAGC | |
| | ACGTGCTGGATGGGCTGCCTCTGACTCAGAGGCATGGCCGGATTTGGCAACTCAAAAC | |
| | CACCTTGCCTCAGCTGATCAGAGTTTCTGTGGAATTCTGTTTGTTAAATCAAATTAGC | |
| | TGGTCTCTGAATTAAGGGGGAGACGACCTTCTCTAAGATGAACAGGGTTCGCCCCAGT | |
| | CCTCCTGCCTGGAGACAGTTGATGTGTCATGCAGAGCTCTTACTTCTCCAGCAACACT | |
| | CTTCAGTACATAATAAGCTTAACTGATAAACAGAATATTTAGAAAGGTGAGACTTGGG | |
| | CTTACCATTGGGTTTAAATCATAGGGACCTAGGGCGAGGGTTCAGGGCTTCTCTGGAG | |
| | CAGATATTGTCAAGTTCATGGCCTTAGGTAGCATGTATCTGGTCTTAACTCTGATTGT | |
| | AGCAAAAGTTCTGAGAGGAGCTGAGCCCTGTTGTGGCCCATTAAAGAACAGGGTCCTC | |
| | AGGCCCTGCCCGCTTCCTGTCCACTGCCCCCTCCCCATCCCCAGCCCAGCCGAGGGAA | |
| | TCCCGTGGGTTGCTTACCTACCTATAAGGTGGTTTATAAGCTGCTGTCCTGGCCACTG | |
| | CATTCAAATTCCAATGTGTACTTCATAGTGTAAAAATTTATATTATTGTGAGGTTTTT | |
| | TGTCTTTTTTTTTTTTTTTTTTTTTTGGTATATTGCTGTATCTACTTTAACTTCCAGA | |
| | AATAAACGTTATATAGGAACCGTC | |
| signal | MAQWNQLQQLDTRYLEQLHQLYSDSFPMELRQFLAPWIESQDWAYAASKESHATLVFH | 37 |
| transducer and | NLLGEIDQQYSRFLQESNVLYQHNLRRIKQFLQSRYLEKPMEIARIVARCLWEESRLL | |
| activator of | QTAATAAQQGGQANHPTAAVVTEKQQMLEQHLQDVRKRVQDLEQKMKVVENLQDDFDF | |
| transcription 3 | NYKTLKSQGDMQDLNGNNQSVTRQKMQQLEQMLTALDQMRRSIVSELAGLLSAMEYVQ | |
| isoform 3 [Homo | KTLTDEELADWKRRQQIACIGGPPNICLDRLENWITSLAESQLQTRQQIKKLEELQQK | |
| sapiens] | VSYKGDPIVQHRPMLEERIVELFRNLMKSAFVVERQPCMPMHPDRPLVIKTGVQFTTK | |
| (NP_998827.1) | VRLLVKFPELNYQLKIKVCIDKDSGDVAALRGSRKFNILGTNTKVMNMEESNNGSLSA | |
| | EFKHLTLREQRCGNGGRANCDASLIVTEELHLITFETEVYHQGLKIDLETHSLPVVVI | |
| | SNICQMPNAWASILWYNMLTNNPKNVNFFTKPPIGTWDQVAEVLSWQFSSTTKRGLSI | |
| | EQLTTLAEKLLGPGVNYSGCQITWAKFCKENMAGKGFSFWVWLDNIIDLVKKYILALW | |
| | NEGYIMGFISKERERAILSTKPPGTFLLRFSESSKEGGVTFTWVEKDISGKTQIQSVE | |
| | PYTKQQLNNMSFAEIIMGYKIMDATNILVSPLVYLYPDIPKEEAFGKYCRPESQEHPE | |
| | ADPGSAAPYLKTKFICVTPFIDAVWK | |
| Homo sapiens | GTCGCAGCCGAGGGAACAAGCCCCAACCGGATCCTGGACAGGCACCCCGGCTTGGCGC | 38 |
| signal | TGTCTCTCCCCCTCGGCTCGGAGAGGCCCTTCGGCCTGAGGGAGCCTCGCCGCCCGTC | |
| transducer and | CCCGGCACACGCGCAGCCCCGGCCTCTCGGCCTCTGCCGGAGAAACAGTTGGGACCCC | |
| activator of | TGATTTTAGCAGGATGGCCCAATGGAATCAGCTACAGCAGCTTGACACACGGTACCTG | |
| transcription 3 | GAGCAGCTCCATCAGCTCTACAGTGACAGCTTCCCAATGGAGCTGCGGCAGTTTCTGG | |
| (STAT3), | CCCCTTGGATTGAGAGTCAAGATTGGGCATATGCGGCCAGCAAAGAATCACATGCCAC | |
| transcript | TTTGGTGTTTCATAATCTCCTGGGAGAGATTGACCAGCAGTATAGCCGCTTCCTGCAA | |
| variant 3 | GAGTCGAATGTTCTCTATCAGCACAATCTACGAAGAATCAAGCAGTTTCTTCAGAGCA | |
| (NM_213662.2) | GGTATCTTGAGAAGCCAATGGAGATTGCCCGGATTGTGGCCCGGTGCCTGTGGGAAGA | |
| | ATCACGCCTTCTACAGACTGCAGCCACTGCGGCCCAGCAAGGGGGCCAGGCCAACCAC | |
| | CCCACAGCAGCCGTGGTGACGGAGAAGCAGCAGATGCTGGAGCAGCACCTTCAGGATG | |
| | TCCGGAAGAGAGTGCAGGATCTAGAACAGAAAATGAAAGTGGTAGAGAATCTCCAGGA | |
| | TGACTTTGATTTCAACTATAAAACCCTCAAGAGTCAAGGAGACATGCAAGATCTGAAT | |
| | GGAAACAACCAGTCAGTGACCAGGCAGAAGATGCAGCAGCTGGAACAGATGCTCACTG | |
| | CGCTGGACCAGATGCGGAGAAGCATCGTGAGTGAGCTGGCGGGGCTTTTGTCAGCGAT | |
| | GGAGTACGTGCAGAAAACTCTCACGGACGAGGAGCTGGCTGACTGGAAGAGGCGGCAA | |
| | CAGATTGCCTGCATTGGAGGCCCGCCCAACATCTGCCTAGATCGGCTAGAAAACTGGA | |
| | TAACGTCATTAGCAGAATCTCAACTTCAGACCCGTCAACAAATTAAGAAACTGGAGGA | |
| | GTTGCAGCAAAAAGTTTCCTACAAAGGGGACCCCATTGTACAGCACCGGCCGATGCTG | |
| | GAGGAGAGAATCGTGGAGCTGTTTAGAAACTTAATGAAAAGTGCCTTTGTGGTGGAGC | |
| | GGCAGCCCTGCATGCCCATGCATCCTGACCGGCCCCTCGTCATCAAGACCGGCGTCCA | |
| | GTTCACTACTAAAGTCAGGTTGCTGGTCAAATTCCCTGAGTTGAATTATCAGCTTAAA | |
| | ATTAAAGTGTGCATTGACAAAGACTCTGGGGACGTTGCAGCTCTCAGAGGATCCCGGA | |
| | AATTTAACATTCTGGGCACAAACACAAAAGTGATGAACATGGAAGAATCCAACAACGG | |
| | CAGCCTCTCTGCAGAATTCAAACACTTGACCCTGAGGGAGCAGAGATGTGGGAATGGG | |
| | GGCCGAGCCAATTGTGATGCTTCCCTGATTGTGACTGAGGAGCTGCACCTGATCACCT | |
| | TTGAGACCGAGGTGTATCACCAAGGCCTCAAGATTGACCTAGAGACCCACTCCTTGCC | |
| | AGTTGTGGTGATCTCCAACATCTGTCAGATGCCAAATGCCTGGGCGTCCATCCTGTGG | |
| | TACAACATGCTGACCAACAATCCCAAGAATGTAAACTTTTTTACCAAGCCCCCAATTG | |
| | GAACCTGGGATCAAGTGGCCGAGGTCCTGAGCTGGCAGTTCTCCTCCACCACCAAGCG | |
| | AGGACTGAGCATCGAGCAGCTGACTACACTGGCAGAGAAACTCTTGGGACCTGGTGTG | |
| | AATTATTCAGGGTGTCAGATCACATGGGCTAAATTTTGCAAAGAAAACATGGCTGGCA | |
| | AGGGCTTCTCCTTCTGGGTCTGGCTGGACAATATCATTGACCTTGTGAAAAAGTACAT | |
| | CCTGGCCCTTTGGAACGAAGGGTACATCATGGGCTTTATCAGTAAGGAGCGGGAGCGG | |
| | GCCATCTTGAGCACTAAGCCTCCAGGCACCTTCCTGCTAAGATTCAGTGAAAGCAGCA | |
| | AAGAAGGAGGCGTCACTTTCACTTGGGTGGAGAAGGACATCAGCGGTAAGACCCAGAT | |
| | CCAGTCCGTGGAACCATACACAAAGCAGCAGCTGAACAACATGTCATTTGCTGAAATC | |
| | ATCATGGGCTATAAGATCATGGATGCTACCAATATCCTGGTGTCTCCACTGGTCTATC | |
| | TCTATCCTGACATTCCCAAGGAGGAGGCATTCGGAAAGTATTGTCGGCCAGAGAGCCA | |
| | GGAGCATCCTGAAGCTGACCCAGGTAGCGCTGCCCCATACCTGAAGACCAAGTTTATC | |
| | TGTGTGACACCATTCATTGATGCAGTTTGGAAATAATGGTGAAGGTGCTGAACCCTCA | |
| | GCAGGAGGGCAGTTTGAGTCCCTCACCTTTGACATGGAGTTGACCTCGGAGTGCGCTA | |
| | CCTCCCCCATGTGAGGAGCTGAGAACGGAAGCTGCAGAAAGATACGACTGAGGCGCCT | |
| | ACCTGCATTCTGCCACCCCTCACACAGCCAAACCCCAGATCATCTGAAACTACTAACT | |
| | TTGTGGTTCCAGATTTTTTTTAATCTCCTACTTCTGCTATCTTTGAGCAATCTGGGCA | |
| | CTTTTAAAAATAGAGAAATGAGTGAATGTGGGTGATCTGCTTTTATCTAAATGCAAAT | |
| | AAGGATGTGTTCTCTGAGACCCATGATCAGGGGATGTGGCGGGGGGTGGCTAGAGGGA | |
| | GAAAAAGGAAATGTCTTGTGTTGTTTTGTTCCCCTGCCCTCCTTTCTCAGCAGCTTTT | |
| | TGTTATTGTTGTTGTTGTTCTTAGACAAGTGCCTCCTGGTGCCTGCGGCATCCTTCTG | |
| | CCTGTTTCTGTAAGCAAATGCCACAGGCCACCTATAGCTACATACTCCTGGCATTGCA | |
| | CTTTTTAACCTTGCTGACATCCAAATAGAAGATAGGACTATCTAAGCCCTAGGTTTCT | |
| | TTTTAAATTAAGAAATAATAACAATTAAAGGGCAAAAAACACTGTATCAGCATAGCCT | |
| | TTCTGTATTTAAGAAACTTAAGCAGCCGGGCATGGTGGCTCACGCCTGTAATCCCAGC | |
| | ACTTTGGGAGGCCGAGGCGGATCATAAGGTCAGGAGATCAAGACCATCCTGGCTAACA | |
| | CGGTGAAACCCCGTCTCTACTAAAAGTACAAAAAATTAGCTGGGTGTGGTGGTGGGCG | |
| | CCTGTAGTCCCAGCTACTCGGGAGGCTGAGGCAGGAGAATCGCTTGAACCTGAGAGGC | |
| | GGAGGTTGCAGTGAGCCAAAATTGCACCACTGCACACTGCACTCCATCCTGGGCGACA | |
| | GTCTGAGACTCTGTCTCAAAAAAAAAAAAAAAAAAAAGAAACTTCAGTTAACAGCCTC | |
| | CTTGGTGCTTTAAGCATTCAGCTTCCTTCAGGCTGGTAATTTATATAATCCCTGAAAC | |
| | GGGCTTCAGGTCAAACCCTTAAGACATCTGAAGCTGCAACCTGGCCTTTGGTGTTGAA | |
| | ATAGGAAGGTTTAAGGAGAATCTAAGCATTTTAGACTTTTTTTTATAAATAGACTTAT | |
| | TTTCCTTTGTAATGTATTGGCCTTTTAGTGAGTAAGGCTGGGCAGAGGGTGCTTACAA | |
| | CCTTGACTCCCTTTCTCCCTGGACTTGATCTGCTGTTTCAGAGGCTAGGTTGTTTCTG | |
| | TGGGTGCCTTATCAGGGCTGGGATACTTCTGATTCTGGCTTCCTTCCTGCCCCACCCT | |
| | CCCGACCCCAGTCCCCCTGATCCTGCTAGAGGCATGTCTCCTTGCGTGTCTAAAGGTC | |
| | CCTCATCCTGTTTGTTTTAGGAATCCTGGTCTCAGGACCTCATGGAAGAAGAGGGGGA | |
| | GAGAGTTACAGGTTGGACATGATGCACACTATGGGGCCCCAGCGACGTGTCTGGTTGA | |
| | GCTCAGGGAATATGGTTCTTAGCCAGTTTCTTGGTGATATCCAGTGGCACTTGTAATG | |
| | GCGTCTTCATTCAGTTCATGCAGGGCAAAGGCTTACTGATAAACTT | |
| | GAGTCTGCCCTCGTATGAGGGTGTATACCTGGCCTCCCTCTGAGGCTGGTGACTCCTC | |
| | CCTGCTGGGGCCCCACAGGTGAGGCAGAACAGCTAGAGGGCCTCCCCGCCTGCCCGCC | |
| | TTGGCTGGCTAGCTCGCCTCTCCTGTGCGTATGGGAACACCTAGCACGTGCTGGATGG | |
| | GCTGCCTCTGACTCAGAGGCATGGCCGGATTTGGCAACTCAAAACCACCTTGCCTCAG | |
| | CTGATCAGAGTTTCTGTGGAATTCTGTTTGTTAAATCAAATTAGCTGGTCTCTGAATT | |
| | AAGGGGGAGACGACCTTCTCTAAGATGAACAGGGTTCGCCCCAGTCCTCCTGCCTGGA | |
| | GACAGTTGATGTGTCATGCAGAGCTCTTACTTCTCCAGCAACACTCTTCAGTACATAA | |
| | TAAGCTTAACTGATAAACAGAATATTTAGAAAGGTGAGACTTGGGCTTACCATTGGGT | |
| | TTAAATCATAGGGACCTAGGGCGAGGGTTCAGGGCTTCTCTGGAGCAGATATTGTCAA | |
| | GTTCATGGCCTTAGGTAGCATGTATCTGGTCTTAACTCTGATTGTAGCAAAAGTTCTG | |
| | AGAGGAGCTGAGCCCTGTTGTGGCCCATTAAAGAACAGGGTCCTCAGGCCCTGCCCGC | |
| | TTCCTGTCCACTGCCCCCTCCCCATCCCCAGCCCAGCCGAGGGAATCCCGTGGGTTGC | |
| | TTACCTACCTATAAGGTGGTTTATAAGCTGCTGTCCTGGCCACTGCATTCAAATTCCA | |
| | ATGTGTACTTCATAGTGTAAAAATTTATATTATTGTGAGGTTTTTTGTCTTTTTTTTT | |
| | TTTTTTTTTTTTTGGTATATTGCTGTATCTACTTTAACTTCCAGAAATAAACGTTATA | |
| | TAGGAACCGTC | |
| signal | MAQWNQLQQLDTRYLEQLHQLYSDSFPMELRQFLAPWIESQDWAYAASKESHATLVFH | 39 |
| transducer and | NLLGEIDQQYSRFLQESNVLYQHNLRRIKQFLQSRYLEKPMEIARIVARCLWEESRLL | |
| activator of | QTAATAAQQGGQANHPTAAVVTEKQQMLEQHLQDVRKRVQDLEQKMKVVENLQDDFDF | |
| transcription 3 | NYKTLKSQGDMQDLNGNNQSVTRQKMQQLEQMLTALDQMRRSIVSELAGLLSAMEYVQ | |
| isoform 4 [Homo | KTLTDEELADWKRRQQIACIGGPPNICLDRLENWITSLAESQLQTRQQIKKLEELQQK | |
| sapiens] | VSYKGDPIVQHRPMLEERIVELFRNLMKSAFVVERQPCMPMHPDRPLVIKTGVQFTTK | |
| (NP_001356448.1) | VRLLVKFPELNYQLKIKVCIDKDSGDVAALRGSRKFNILGTNTKVMNMEESNNGSLSA | |
| | EFKHLTLREQRCGNGGRANCDASLIVTEELHLITFETEVYHQGLKIDLETHSLPVVVI | |
| | SNICQMPNAWASILWYNMLTNNPKNVNFFTKPPIGTWDQVAEVLSWQFSSTTKRGLSI | |
| | EQLTTLAEKLLGPGVNYSGCQITWAKFCKENMAGKGFSFWVWLDNIIDLVKKYILALW | |
| | NEGYIMGFISKERERAILSTKPPGTFLLRFSESSKEGGVTFTWVEKDISGKTQIQSVE | |
| | PYTKQQLNNMSFAEIIMGYKIMDATNILVSPLVYLYPDIPKEEAFGKYCRPESQEHPE | |
| | ADPGAAPYLKTKFICVTPFIDAVWK | |
| Homo sapiens | GTCGCAGCCGAGGGAACAAGCCCCAACCGGATCCTGGACAGGCACCCCGGCTTGGCGC | 40 |
| signal | TGTCTCTCCCCCTCGGCTCGGAGAGGCCCTTCGGCCTGAGGGAGCCTCGCCGCCCGTC | |
| transducer and | CCCGGCACACGCGCAGCCCCGGCCTCTCGGCCTCTGCCGGAGAAACAGGATGGCCCAA | |
| activator of | TGGAATCAGCTACAGCAGCTTGACACACGGTACCTGGAGCAGCTCCATCAGCTCTACA | |
| transcription 3 | GTGACAGCTTCCCAATGGAGCTGCGGCAGTTTCTGGCCCCTTGGATTGAGAGTCAAGA | |
| (STAT3), | TTGGGCATATGCGGCCAGCAAAGAATCACATGCCACTTTGGTGTTTCATAATCTCCTG | |
| transcript | GGAGAGATTGACCAGCAGTATAGCCGCTTCCTGCAAGAGTCGAATGTTCTCTATCAGC | |
| variant 10 | ACAATCTACGAAGAATCAAGCAGTTTCTTCAGAGCAGGTATCTTGAGAAGCCAATGGA | |
| (NM_001369519.1) | GATTGCCCGGATTGTGGCCCGGTGCCTGTGGGAAGAATCACGCCTTCTACAGACTGCA | |
| | GCCACTGCGGCCCAGCAAGGGGGCCAGGCCAACCACCCCACAGCAGCCGTGGTGACGG | |
| | AGAAGCAGCAGATGCTGGAGCAGCACCTTCAGGATGTCCGGAAGAGAGTGCAGGATCT | |
| | AGAACAGAAAATGAAAGTGGTAGAGAATCTCCAGGATGACTTTGATTTCAACTATAAA | |
| | ACCCTCAAGAGTCAAGGAGACATGCAAGATCTGAATGGAAACAACCAGTCAGTGACCA | |
| | GGCAGAAGATGCAGCAGCTGGAACAGATGCTCACTGCGCTGGACCAGATGCGGAGAAG | |
| | CATCGTGAGTGAGCTGGCGGGGCTTTTGTCAGCGATGGAGTACGTGCAGAAAACTCTC | |
| | ACGGACGAGGAGCTGGCTGACTGGAAGAGGCGGCAACAGATTGCCTGCATTGGAGGCC | |
| | CGCCCAACATCTGCCTAGATCGGCTAGAAAACTGGATAACGTCATTAGCAGAATCTCA | |
| | ACTTCAGACCCGTCAACAAATTAAGAAACTGGAGGAGTTGCAGCAAAAAGTTTCCTAC | |
| | AAAGGGGACCCCATTGTACAGCACCGGCCGATGCTGGAGGAGAGAATCGTGGAGCTGT | |
| | TTAGAAACTTAATGAAAAGTGCCTTTGTGGTGGAGCGGCAGCCCTGCATGCCCATGCA | |
| | TCCTGACCGGCCCCTCGTCATCAAGACCGGCGTCCAGTTCACTACTAAAGTCAGGTTG | |
| | CTGGTCAAATTCCCTGAGTTGAATTATCAGCTTAAAATTAAAGTGTGCATTGACAAAG | |
| | ACTCTGGGGACGTTGCAGCTCTCAGAGGATCCCGGAAATTTAACATTCTGGGCACAAA | |
| | CACAAAAGTGATGAACATGGAAGAATCCAACAACGGCAGCCTCTCTGCAGAATTCAAA | |
| | CACTTGACCCTGAGGGAGCAGAGATGTGGGAATGGGGGCCGAGCCAATTGTGATGCTT | |
| | CCCTGATTGTGACTGAGGAGCTGCACCTGATCACCTTTGAGACCGAGGTGTATCACCA | |
| | AGGCCTCAAGATTGACCTAGAGACCCACTCCTTGCCAGTTGTGGTGATCTCCAACATC | |
| | TGTCAGATGCCAAATGCCTGGGCGTCCATCCTGTGGTACAACATGCTGACCAACAATC | |
| | CCAAGAATGTAAACTTTTTTACCAAGCCCCCAATTGGAACCTGGGATCAAGTGGCCGA | |
| | GGTCCTGAGCTGGCAGTTCTCCTCCACCACCAAGCGAGGACTGAGCATCGAGCAGCTG | |
| | ACTACACTGGCAGAGAAACTCTTGGGACCTGGTGTGAATTATTCAGGGTGTCAGATCA | |
| | CATGGGCTAAATTTTGCAAAGAAAACATGGCTGGCAAGGGCTTCTCCTTCTGGGTCTG | |
| | GCTGGACAATATCATTGACCTTGTGAAAAAGTACATCCTGGCCCTTTGGAACGAAGGG | |
| | TACATCATGGGCTTTATCAGTAAGGAGCGGGAGCGGGCCATCTTGAGCACTAAGCCTC | |
| | CAGGCACCTTCCTGCTAAGATTCAGTGAAAGCAGCAAAGAAGGAGGCGTCACTTTCAC | |
| | TTGGGTGGAGAAGGACATCAGCGGTAAGACCCAGATCCAGTCCGTGGAACCATACACA | |
| | AAGCAGCAGCTGAACAACATGTCATTTGCTGAAATCATCATGGGCTATAAGATCATGG | |
| | ATGCTACCAATATCCTGGTGTCTCCACTGGTCTATCTCTATCCTGACATTCCCAAGGA | |
| | GGAGGCATTCGGAAAGTATTGTCGGCCAGAGAGCCAGGAGCATCCTGAAGCTGACCCA | |
| | GGCGCTGCCCCATACCTGAAGACCAAGTTTATCTGTGTGACACCATTCATTGATGCAG | |
| | TTTGGAAATAATGGTGAAGGTGCTGAACCCTCAGCAGGAGGGCAGTTTGAGTCCCTCA | |
| | CCTTTGACATGGAGTTGACCTCGGAGTGCGCTACCTCCCCCATGTGAGGAGCTGAGAA | |
| | CGGAAGCTGCAGAAAGATACGACTGAGGCGCCTACCTGCATTCTGCCACCCCTCACAC | |
| | AGCCAAACCCCAGATCATCTGAAACTACTAACTTTGTGGTTCCAGATTTTTTTTAATC | |
| | TCCTACTTCTGCTATCTTTGAGCAATCTGGGCACTTTTAAAAATAGAGAAATGAGTGA | |
| | ATGTGGGTGATCTGCTTTTATCTAAATGCAAATAAGGATGTGTTCTCTGAGACCCATG | |
| | ATCAGGGGATGTGGCGGGGGGTGGCTAGAGGGAGAAAAAGGAAATGTCTTGTGTTGTT | |
| | TTGTTCCCCTGCCCTCCTTTCTCAGCAGCTTTTTGTTATTGTTGTTGTTGTTCTTAGA | |
| | CAAGTGCCTCCTGGTGCCTGCGGCATCCTTCTGCCTGTTTCTGTAAGCAAATGCCACA | |
| | GGCCACCTATAGCTACATACTCCTGGCATTGCACTTTTTAACCTTGCTGACATCCAAA | |
| | TAGAAGATAGGACTATCTAAGCCCTAGGTTTCTTTTTAAATTAAGAAATAATAACAAT | |
| | TAAAGGGCAAAAAACACTGTATCAGCATAGCCTTTCTGTATTTAAGAAACTTAAGCAG | |
| | CCGGGCATGGTGGCTCACGCCTGTAATCCCAGCACTTTGGGAGGCCGAGGCGGATCAT | |
| | AAGGTCAGGAGATCAAGACCATCCTGGCTAACACGGTGAAACCCCGTCTCTACTAAAA | |
| | GTACAAAAAATTAGCTGGGTGTGGTGGTGGGCGCCTGTAGTCCCAGCTACTCGGGAGG | |
| | CTGAGGCAGGAGAATCGCTTGAACCTGAGAGGCGGAGGTTGCAGTGAGCCAAAATTGC | |
| | ACCACTGCACACTGCACTCCATCCTGGGCGACAGTCTGAGACTCTGTCTCAAAAAAAA | |
| | AAAAAAAAAAAAGAAACTTCAGTTAACAGCCTCCTTGGTGCTTTAAGCATTCAGCTTC | |
| | CTTCAGGCTGGTAATTTATATAATCCCTGAAACGGGCTTCAGGTCAAACCCTTAAGAC | |
| | ATCTGAAGCTGCAACCTGGCCTTTGGTGTTGAAATAGGAAGGTTTAAGGAGAATCTAA | |
| | GCATTTTAGACTTTTTTTTATAAATAGACTTATTTTCCTTTGTAATGTATTGGCCTTT | |
| | TAGTGAGTAAGGCTGGGCAGAGGGTGCTTACAACCTTGACTCCCTTTCTCCCTGGACT | |
| | TGATCTGCTGTTTCAGAGGCTAGGTTGTTTCTGTGGGTGCCTTATCAGGGCTGGGATA | |
| | CTTCTGATTCTGGCTTCCTTCCTGCCCCACCCTCCCGACCCCAGTCCCCCTGATCCTG | |
| | CTAGAGGCATGTCTCCTTGCGTGTCTAAAGGTCCCTCATCCTGTTTGTTTTAGGAATC | |
| | CTGGTCTCAGGACCTCATGGAAGAAGAGGGGGAGAGAGTTACAGGTTGGACATGATGC | |
| | ACACTATGGGGCCCCAGCGACGTGTCTGGTTGAGCTCAGGGAATATGGTTCTTAGCCA | |
| | GTTTCTTGGTGATATCCAGTGGCACTTGTAATGGCGTCTTCATTCAGTTCATGCAGGG | |
| | CAAAGGCTTACTGATAAACTTGAGTCTGCCCTCGTATGAGGGTGTA | |
| | TACCTGGCCTCCCTCTGAGGCTGGTGACTCCTCCCTGCTGGGGCCCCACAGGTGAGGC | |
| | AGAACAGCTAGAGGGCCTCCCCGCCTGCCCGCCTTGGCTGGCTAGCTCGCCTCTCCTG | |
| | TGCGTATGGGAACACCTAGCACGTGCTGGATGGGCTGCCTCTGACTCAGAGGCATGGC | |
| | CGGATTTGGCAACTCAAAACCACCTTGCCTCAGCTGATCAGAGTTTCTGTGGAATTCT | |
| | GTTTGTTAAATCAAATTAGCTGGTCTCTGAATTAAGGGGGAGACGACC | |
| | TTCTCTAAGATGAACAGGGTTCGCCCCAGTCCTCCTGCCTGGAGACAGTTGATGTGTC | |
| | ATGCAGAGCTCTTACTTCTCCAGCAACACTCTTCAGTACATAATAAGCTTAACTGATA | |
| | AACAGAATATTTAGAAAGGTGAGACTTGGGCTTACCATTGGGTTTAAATCATAGGGAC | |
| | CTAGGGCGAGGGTTCAGGGCTTCTCTGGAGCAGATATTGTCAAGTTCATGGCCTTAGG | |
| | TAGCATGTATCTGGTCTTAACTCTGATTGTAGCAAAAGTTCTGAGAGGAGCTGAGCCC | |
| | TGTTGTGGCCCATTAAAGAACAGGGTCCTCAGGCCCTGCCCGCTTCCTGTCCACTGCC | |
| | CCCTCCCCATCCCCAGCCCAGCCGAGGGAATCCCGTGGGTTGCTTACCTACCTATAAG | |
| | GTGGTTTATAAGCTGCTGTCCTGGCCACTGCATTCAAATTCCAATGTGTACTTCATAG | |
| | TGTAAAAATTTATATTATTGTGAGGTTTTTTGTCTTTTTTTTTTTTTTTTTTTTTTGG | |
| | TATATTGCTGTATCTACTTTAACTTCCAGAAATAAACGTTATATAGGAACCGTC | |

[0368] Some aspects of the disclosure provide fusion proteins comprising a nucleic acid programmable DNA binding protein (napDNAbp) and a deaminase (e.g., adenosine or cytidine deaminase). In some embodiments, any of the fusion proteins provided herein is a base editor. In some embodiments, the napDNAbp is a Cas9 domain, a Cpf1 domain, a CasX domain, a CasY domain, a C2c1 domain, a C2c2 domain, aC2c3 domain, or an Argonaute domain. In some embodiments, the napDNAbp is any napDNAbp provided herein. Some aspects of the disclosure provide fusion proteins comprising a Cas9 domain and a deaminase (e.g., an adenosine or cytidine deaminase). The Cas9 domain may be any of the Cas9 domains or Cas9 proteins (e.g., dCas9 or nCas9) provided herein. In some embodiments, any of the Cas9 domains or Cas9 proteins (e.g., dCas9 or nCas9) provided herein may be fused with any of the deaminases (e.g., adenosine or cytidine deaminases) provided herein. In some embodiments, the fusion protein comprises the structure:
[0369] NH₂-[deaminase]-[napDNAbp]-COOH; or
[0370] NH₂-[napDNAbp][deaminase]-COOH

[0371] In some embodiments, the fusion proteins comprising an adenosine deaminase and a napDNAbp (e.g., Cas9 domain) do not include a linker sequence. In some embodiments, a linker is present between the adenosine deaminase domain and the napDNAbp. In some embodiments, the “-” used in the general architecture above indicates the presence of an optional linker. In some embodiments, the adenosine deaminase and the napDNAbp are fused via any of the linkers provided herein. For example, in some embodiments the adenosine deaminase and the napDNAbp are fused via any of the linkers provided above in the section entitled “Linkers”. In some embodiments, the adenosine deaminase and the napDNAbp are fused via a linker that comprises between 1 and 200 amino acids. In some embodiments, the adenosine deaminase and the napDNAbp are fused via a linker that comprises from 1 to 5, 1 to 10, 1 to 20, 1 to 30, 1 to 40, 1 to 50, 1 to 60, 1 to 80, 1 to 100, 1 to 150, 1 to 200, 5 to 10, 5 to 20, 5 to 30, 5 to 40, 5 to 60, 5 to 80, 5 to 100, 5 to 150, 5 to 200, 10 to 20, 10 to 30, 10 to 40, 10 to 50, 10 to 60, 10 to 80, 10 to 100, 10 to 150, 10 to 200, 20 to 30, 20 to 40, 20 to 50, 20 to 60, 20 to 80, 20 to 100, 20 to 150, 20 to 200, 30 to 40, 30 to 50, 30 to 60, 30 to 80, 30 to 100, 30 to 150, 30 to 200, 40 to 50, 40 to 60, 40 to 80, 40 to 100, 40 to 150, 40 to 200, 50 to 60 50 to 80, 50 to 100, 50 to 150, 50 to 200, 60 to 80, 60 to 100, 60 to 150, 60 to 200, 80 to 100, 80 to 150, 80 to 200, 100 to 150, 100 to 200, or 150 to 200 amino acids in length. In some embodiments, the adenosine deaminase and the napDNAbp are fused via a linker that comprises 3, 4, 16, 24, 32, 64, 100, or 104 amino acids in length. In some embodiments, the adenosine deaminase and the napDNAbp are fused via a linker that comprises the amino acid sequence of SGSETPGTSESATPES (SEQ ID NO: 135), SGGS (SEQ ID NO: 137), SGGSSGSETPGTSESATPESSGGS (SEQ ID NO: 145), SGGSSGGSSGSETPGTSESATPESSGGSSGGS (SEQ ID NO: 146), or GGSGGSPGSPAGSPTSTEEGTSESATPESGPGTSTEPSEGSAPGSPAGSPTSTEEGTSTE PSEGSAPGTSTEPSEGSAPGTSESATPESGPGSEPATSGGSGGS (SEQ ID NO: 147). In some embodiments, the adenosine deaminase and the napDNAbp are fused via a linker comprising the amino acid sequence SGSETPGTSESATPES (SEQ ID NO: 135), which may also be referred to as the XTEN linker. In some embodiments, the linker is 24 amino acids in length. In some embodiments, the linker comprises the amino acid sequence SGGSSGGSSGSETPGTSESATPES (SEQ ID NO: 148). In some embodiments, the linker is 32 amino acids in length. In some embodiments, the linker comprises the amino acid sequence (SGGS)₂-SGSETPGTSESATPES-(SGGS)₂ (SEQ ID NO: 136), which may also be referred to as (SGGS)₂-XTEN-(SGGS)₂ (SEQ ID NO: 136). In some embodiments, the linker comprises the amino acid sequence (SGGS)ₙ-SGSETPGTSESATPES-(SGGS), (SEQ ID NO: 142), wherein n is 0, 1, 2, 3, 4, 5, 6, 7, 8, 9, or 10. In some embodiments, the linker is 40 amino acids in length. In some embodiments, the linker comprises the amino acid sequence SGGSSGGSSGSETPGTSESATPESSGGSSGGSSGGSSGGS (SEQ ID NO: 149). In some embodiments, the linker is 64 amino acids in length. In some embodiments, the linker comprises the amino acid sequence SGGSSGGSSGSETPGTSESATPESSGGSSGGSSGGSSGGSSGSETPGTSESATPESSGGS SGGS (SEQ ID NO: 150). In some embodiments, the linker is 92 amino acids in length. In some embodiments, the linker comprises the amino acid sequence

(SEQ ID NO: 151)
PGSPAGSPTSTEEGTSESATPESGPGTSTEPSEGSAPGSPAGSPTSTEEG
TSTEPSEGSAPGTSTEPSEGSAPGTSESATPESGPGSEPATS.

[0372] In other embodiments, the fusion proteins comprising an cytidine deaminase and a napDNAbp (e.g., Cas9 domain) do not include a linker sequence. In some embodiments, a linker is present between the cytidine deaminase domain and the napDNAbp. In some embodiments, the “-” used in the general architecture above indicates the presence of an optional linker. In some embodiments, the cytidine deaminase and the napDNAbp are fused via any of the linkers provided herein. For example, in some embodiments the cytidine deaminase and the napDNAbp are fused via any of the linkers provided above in the section entitled “Linkers”. In some embodiments, the cytidine deaminase and the napDNAbp are fused via a linker that comprises between 1 and 200 amino acids. In some embodiments, the cytidine deaminase and the napDNAbp are fused via a linker that comprises from 1 to 5, 1 to 10, 1 to 20, 1 to 30, 1 to 40, 1 to 50, 1 to 60, 1 to 80, 1 to 100, 1 to 150, 1 to 200, 5 to 10, 5 to 20, 5 to 30, 5 to 40, 5 to 60, 5 to 80, 5 to 100, 5 to 150, 5 to 200, 10 to 20, 10 to 30, 10 to 40, 10 to 50, 10 to 60, 10 to 80, 10 to 100, 10 to 150, 10 to 200, 20 to 30, 20 to 40, 20 to 50, 20 to 60, 20 to 80, 20 to 100, 20 to 150, 20 to 200, 30 to 40, 30 to 50, 30 to 60, 30 to 80, 30 to 100, 30 to 150, 30 to 200, 40 to 50, 40 to 60, 40 to 80, 40 to 100, 40 to 150, 40 to 200, 50 to 60 50 to 80, 50 to 100, 50 to 150, 50 to 200, 60 to 80, 60 to 100, 60 to 150, 60 to 200, 80 to 100, 80 to 150, 80 to 200, 100 to 150, 100 to 200, or 150 to 200 amino acids in length.

[0373] In some embodiments, the fusion proteins provided herein further comprise one or more nuclear targeting sequences, for example, a nuclear localization sequence (NLS). In some embodiments, a NLS comprises an amino acid sequence that facilitates the importation of a protein, that comprises an NLS, into the cell nucleus (e.g., by nuclear transport). In some embodiments, any of the fusion proteins provided herein further comprise a nuclear localization sequence (NLS). In some embodiments, the NLS is fused to the N-terminus of the fusion protein. In some embodiments, the NLS is fused to the C-terminus of the fusion protein. In some embodiments, the NLS is fused to the N-terminus of the napDNAbp. In some embodiments, the NLS is fused to the C-terminus of the napDNAbp. In some embodiments, the NLS is fused to the N-terminus of the adenosine deaminase. In some embodiments, the NLS is fused to the C-terminus of the adenosine deaminase. In some embodiments, the NLS is fused to the fusion protein via one or more linkers. In some embodiments, the NLS is fused to the fusion protein without a linker. In some embodiments, the NLS comprises an amino acid sequence of any one of the NLS sequences provided or referenced herein. In some embodiments, the NLS comprises an amino acid sequence as set forth in any one of SEQ ID NOs: 30-33. Additional nuclear localization sequences are known in the art and would be apparent to the skilled artisan. For example, NLS sequences are described in Plank et al., PCT/EP2000/011690, the contents of which are incorporated herein by reference for their disclosure of exemplary nuclear localization sequences.

[0374] In some embodiments, the general architecture of exemplary fusion proteins with an adenosine deaminase and a napDNAbp comprises any one of the following structures, where NLS is a nuclear localization sequence (e.g., any NLS provided herein), NH₂ is the N-terminus of the fusion protein, and COOH is the C-terminus of the fusion protein. Fusion proteins comprising an adenosine deaminase, a napDNAbp, and a NLS:
[0375] NH₂-[NLS]-[deaminase]-[napDNAbp]-COOH;
[0376] NH₂-[deaminase]-[NLS]-[napDNAbp]-COOH;
[0377] NH₂-[deaminase]-[napDNAbp]-[NLS]-COOH;
[0378] NH₂-[NLS]-[napDNAbp]-[deaminase]-COOH;
[0379] NH₂-[napDNAbp]-[NLS]-[deaminase]-COOH; and
[0380] NH₂-[napDNAbp]-[deaminase][NLS]-COOH.

[0381] In some embodiments, the fusion proteins provided herein do not comprise a linker. In some embodiments, a linker is present between one or more of the domains or proteins (e.g., adenosine deaminase, napDNAbp, and/or NLS). In some embodiments, the “-” used in the general architecture above indicates the presence of an optional linker.

[0382] Some aspects of the disclosure provide fusion proteins (e.g., base editors) that comprise a nucleic acid programmable DNA binding protein (napDNAbp) and at least two adenosine deaminase domains. Without wishing to be bound by any particular theory, dimerization of adenosine deaminases (e.g., in cis or in trans) may improve the ability (e.g., efficiency) of the fusion protein to modify a nucleic acid base, for example to deaminate adenine. In some embodiments, any of the fusion proteins may comprise 2, 3, 4 or 5 adenosine deaminase domains. In some embodiments, any of the fusion proteins provided herein comprise two adenosine deaminases. In some embodiments, any of the fusion proteins provided herein contain only two adenosine deaminases. In some embodiments, the adenosine deaminases are the same. In some embodiments, the adenosine deaminases are any of the adenosine deaminases provided herein. In some embodiments, the adenosine deaminases are different.

[0383] In some embodiments, the first adenosine deaminase is any of the adenosine deaminases provided herein, and the second adenosine is any of the adenosine deaminases provided herein, but is not identical to the first adenosine deaminase. As one example, the fusion protein may comprise a first adenosine deaminase and a second adenosine deaminase that both comprise the amino acid sequence of SEQ ID NO: 10, which contains a W23R; H36L; P48A; R51L; L84F; A106V; D108N; H123Y; S146C; D147Y; R152P; E155V; I156F; and K157N mutation from ecTadA (SEQ ID NO: 1). In some embodiments, the fusion protein may comprise a first adenosine deaminase that comprises, e.g., the amino acid sequence of SEQ ID NO: 1, and a second adenosine deaminase domain that comprises the amino acid sequence of TadA7.10 of SEQ ID NO: 10. Additional fusion protein constructs comprising two adenosine deaminase domains are illustrated herein and are provided in the art.

[0384] In some embodiments, the fusion protein comprises two adenosine deaminases (e.g., a first adenosine deaminase and a second adenosine deaminase). In some embodiments, the fusion protein comprises a first adenosine deaminase and a second adenosine deaminase. In some embodiments, the first adenosine deaminase is N-terminal to the second adenosine deaminase in the fusion protein. In some embodiments, the first adenosine deaminase is C-terminal to the second adenosine deaminase in the fusion protein. In some embodiments, the first adenosine deaminase and the second deaminase are fused directly or via a linker. In some embodiments, the linker is any of the linkers provided herein, for example, any of the linkers described in the “Linkers” section. In some embodiments, the linker comprises the amino acid sequence of any one of SEQ ID NOs: 135-152. In some embodiments, the linker is 32 amino acids in length. In some embodiments, the linker comprises the amino acid sequence (SGGS)₂-SGSETPGTSESATPES-(SGGS)₂ (SEQ ID NO: 136), which may also be referred to as (SGGS)₂-XTEN-(SGGS)₂ (SEQ ID NO: 136). In some embodiments, the linker comprises the amino acid sequence (SGGS)ₙ-SGSETPGTSESATPES-(SGGS)ₙ (SEQ ID NO: 142), wherein n is 0, 1, 2, 3, 4, 5, 6, 7, 8, 9, or 10. In some embodiments, the first adenosine deaminase is the same as the second adenosine deaminase. In some embodiments, the first adenosine deaminase and the second adenosine deaminase are any of the adenosine deaminases described herein. In some embodiments, the first adenosine deaminase and the second adenosine deaminase are different. In some embodiments, the first adenosine deaminase is any of the adenosine deaminases provided herein. In some embodiments, the second adenosine deaminase is any of the adenosine deaminases provided herein but is not identical to the first adenosine deaminase. In some embodiments, the first adenosine deaminase is an ecTadA adenosine deaminase. In some embodiments, the first adenosine deaminase comprises an amino acid sequence that is at least 60%, at least 65%, at least 70%, at least 75%, at least 80%, at least 85%, at least 90%, at least 95%, at least 96%, at least 97%, at least 98%, at least 99%, or at least 99.5% identical to any one of the amino acid sequences set forth in any one of SEQ ID NOs: 1-10, or to any of the adenosine deaminases provided herein. In some embodiments, the first adenosine deaminase comprises the amino acid sequence of SEQ ID NO: 1. In some embodiments, the second adenosine deaminase comprises an amino acid sequence that is at least 60%, at least 65%, at least 70%, at least 75%, at least 80%, at least 85%, at least 90%, at least 95%, at least 96%, at least 97%, at least 98%, at least 99%, or at least 99.5% identical to any one of the amino acid sequences set forth in any one of SEQ ID NOs: 1-10, or to any of the adenosine deaminases provided herein. The amino acid sequences of the first and second adenosine deaminase can be the same or different. In some embodiments, the second adenosine deaminase comprises the amino acid sequence of SEQ ID NO: 10.

[0385] In some embodiments, the general architecture of exemplary fusion proteins with a first adenosine deaminase, a second adenosine deaminase, and a napDNAbp comprises any one of the following structures, where NLS is a nuclear localization sequence (e.g., any NLS provided herein), NH₂ is the N-terminus of the fusion protein, and COOH is the C-terminus of the fusion protein.

[0386] Thus, in some embodiments, the disclosure provides base editors comprising a first adenosine deaminase, a second adenosine deaminase, and a napDNAbp, such as: NH₂-[first adenosine deaminase]-[second adenosine deaminase]-[napDNAbp]-COOH; NH₂-[first adenosine deaminase]-[napDNAbp]-[second adenosine deaminase]-COOH; NH₂-[napDNAbp]-[first adenosine deaminase]-[second adenosine deaminase]-COOH; NH₂-[second adenosine deaminase]-[first adenosine deaminase]-[napDNAbp]-COOH; NH₂-[second adenosine deaminase]-[napDNAbp]-[first adenosine deaminase]-COOH; NH₂-[napDNAbp]-[second adenosine deaminase]-[first adenosine deaminase]-COOH.

[0387] In some embodiments, the fusion proteins provided herein do not comprise a linker. In some embodiments, a linker is present between one or more of the domains or proteins (e.g., first adenosine deaminase, second adenosine deaminase, and/or napDNAbp). In some embodiments, the “-” used in the general architecture above indicates the presence of an optional linker.

[0388] In other embodiments, the disclosure provides base editors comprising a first adenosine deaminase, a second adenosine deaminase, a napDNAbp, and an NLS, such as: NH₂-[NLS]-[first adenosine deaminase]-[second adenosine deaminase]-[napDNAbp]-COOH; NH₂-[first adenosine deaminase]-[NLS]-[second adenosine deaminase]-[napDNAbp]-COOH; NH₂-[first adenosine deaminase]-[second adenosine deaminase]-[NLS]-[napDNAbp]-COOH; NH₂-[first adenosine deaminase]-[second adenosine deaminase]-[napDNAbp]-[NLS]-COOH; NH₂-[NLS]-[first adenosine deaminase]-[napDNAbp]-[second adenosine deaminase]-COOH; NH₂-[first adenosine deaminase]-[NLS]-[napDNAbp]-[second adenosine deaminase]-COOH; NH₂-[first adenosine deaminase]-[napDNAbp]-[NLS]-[second adenosine deaminase]-COOH; NH₂-[first adenosine deaminase]-[napDNAbp]-[second adenosine deaminase]-[NLS]-COOH; NH₂-[NLS]-[napDNAbp]-[first adenosine deaminase]-[second adenosine deaminase]-COOH; NH₂-[napDNAbp]-[NLS]-[first adenosine deaminase]-[second adenosine deaminase]-COOH; NH₂-[napDNAbp]-[first adenosine deaminase]-[NLS]-[second adenosine deaminase]-COOH; NH₂-[napDNAbp]-[first adenosine deaminase]-[second adenosine deaminase]-[NLS]-COOH; NH₂-[NLS]-[second adenosine deaminase]-[first adenosine deaminase]-[napDNAbp]-COOH; NH₂-[second adenosine deaminase]-[NLS]-[first adenosine deaminase]-[napDNAbp]-COOH; NH₂-[second adenosine deaminase]-[first adenosine deaminase]-[NLS]-[napDNAbp]-COOH; NH₂-[second adenosine deaminase]-[first adenosine deaminase]-[napDNAbp]-[NLS]-COOH; NH₂-[NLS]-[second adenosine deaminase]-[napDNAbp]-[first adenosine deaminase]-COOH; NH₂-[second adenosine deaminase]-[NLS]-[napDNAbp]-[first adenosine deaminase]-COOH; NH₂-[second adenosine deaminase]-[napDNAbp]-[NLS]-[first adenosine deaminase]-COOH; NH₂-[second adenosine deaminase]-[napDNAbp]-[first adenosine deaminase]-[NLS]-COOH; NH₂-[NLS]-[napDNAbp]-[second adenosine deaminase]-[first adenosine deaminase]-COOH; NH₂-[napDNAbp]-[NLS]-[second adenosine deaminase]-[first adenosine deaminase]-COOH; NH₂-[napDNAbp]-[second adenosine deaminase]-[NLS]-[first adenosine deaminase]-COOH; NH₂-[napDNAbp]-[second adenosine deaminase]-[first adenosine deaminase]-[NLS]-COOH.

[0389] In some embodiments, the fusion proteins provided herein do not comprise a linker. In some embodiments, a linker is present between one or more of the domains or proteins (e.g., first adenosine deaminase, second adenosine deaminase, napDNAbp, and/or NLS). In some embodiments, the “-” used in the general architecture above indicates the presence of an optional linker.

[0390] It should be appreciated that the fusion proteins of the present disclosure may comprise one or more additional features. For example, in some embodiments, the fusion protein may comprise cytoplasmic localization sequences, export sequences, such as nuclear export sequences, or other localization sequences, as well as sequence tags that are useful for solubilization, purification, or detection of the fusion proteins. Suitable protein tags provided herein include, but are not limited to, biotin carboxylase carrier protein (BCCP) tags, myc-tags, calmodulin-tags, FLAG-tags, hemagglutinin (HA)-tags, polyhistidine tags, also referred to as histidine tags or His-tags, maltose binding protein (MBP)-tags, nus-tags, glutathione-S-transferase (GST)-tags, green fluorescent protein (GFP)-tags, thioredoxin-tags, S-tags, Softags (e.g., Softag 1, Softag 3), strep-tags, biotin ligase tags, FlAsH tags, V5 tags, and SBP-tags. Additional suitable sequences will be apparent to those of skill in the art. In some embodiments, the fusion protein comprises one or more His tags.

[0391] (1) Exemplary ABEs

[0392] Some aspects of the disclosure provide base editors comprising a napDNAbp domain (e.g., an nCas9 domain) and one or more adenosine deaminase domains (e.g., a heterodimer of adenosine deaminases). Such fusion proteins can be referred to as adenosine base editors (ABEs). In some embodiments, the ABEs have reduced off-target effects. In some embodiments, the base editors comprise adenine base editors for multiplexing applications. In still other embodiments, the base editors comprise ancestrally reconstructed adenine base editors.

[0393] The present disclosure provides motifs of newly discovered mutations to TadA 7.10 (SEQ ID NO: 10) (the TadA* used in ABEmax) that yield adenosine deaminase variants and confer broader Cas compatibility to the deaminase. These motifs also confer reduced off-target effects, such as reduced RNA editing activity and off-target DNA editing activity, on the base editor. The base editors of the present disclosure comprise one or more of the disclosed adenosine deaminase variants. In other embodiments, the base editors may comprise one or more adenosine deaminases having two or more such substitutions in combination. In some embodiments, the base editors comprise adenosine deaminases comprising a sequence with at least 80%, 85%, 90%, 95%, 98%, 99%, or 99.5% sequence identity to SEQ ID NO: 73 (TadA-8e).

[0394] Exemplary ABEs of this disclosure comprise the monomer and dimer versions of the following editors: ABE8e, SaABE8e, SaKKH-ABE8e, NG-ABE8e, ABE-xCas9, ABE8e-NRTH, ABE8e-NRRH, ABE8e-NRCH, ABE8e-NG-CP1041, ABE8e-VRQR-CP1041, ABE8e-CP1041, ABE8e-CP1028, ABE8e-VRQR, ABE8e-LbCas12a (LbABE8e), ABE8e-AsCas12a (enAsABE8e), ABE8e-SpyMac, ABE8e (TadA-8e V106W), ABE8e (K20A,R21A), and ABE8e(TadA-8e V82G). The monomer version refers to an editor having an adenosine deaminase domain that comprises a TadA8e and does not comprise a second adenosine deaminase enzyme. The dimer version refers to an editor having an adenosine deaminase domain that comprises a first and second adenosine deaminase, i.e., a wild-type TadA enzyme and a TadA8e enzyme.

[0395] Some aspects of the disclosure provide fusion proteins (e.g., ABEs) comprising a Cas9 domain and an adenosine deaminase. Exemplary ABEs include, without limitation, the following fusion proteins (for the purposes of clarity, and wherein shown, the adenosine deaminase domain is shown in Bold; mutations of the ecTadA deaminase domain are shown in Bold underlining; the XTEN linker is shown in italics; the UGI/AAG/EndoV domains are shown in Bold italics; and NLS is shown in underlined italics), and any base editors comprising sequences that are at least 85%, at least 90%, at least 95%, at least 98%, at least 99%, or at least 99.5% identical to any of the following amino acid sequences:

ecTadA(wt)-XTEN-nCas9-NLS:
(SEQ ID NO: 153)
MSEVEFSHEYWMRHALTLAKRAWDEREVPVGAVLVHNNRVIGEGWNRPIGRH
DPTAHAEIMALRQGGLVMQNYRLIDATLYVTLEPCVMCAGAMIHSRIGRVVFG
ARDAKTGAAGSLMDVLHHPGMNHRVEITEGILADECAALLSDFFRMRRQEIKA
QKKAQSSTDSGSETPGTSESATPESDKKYSIGLAIGTNSVGWAVITDEYKVPSKKFKV
LGNTDRHSIKKNLIGALLFDSGETAEATRLKRTARRRYTRRKNRICYLQEIFSNEMAK
VDDSFFHRLEESFLVEEDKKHERHPIFGNIVDEVAYHEKYPTIYHLRKKLVDSTDKAD
LRLIYLALAHMIKFRGHFLIEGDLNPDNSDVDKLFIQLVQTYNQLFEENPINASGVDA
KAILSARLSKSRRLENLIAQLPGEKKNGLFGNLIALSLGLTPNFKSNFDLAEDAKLQLS
KDTYDDDLDNLLAQIGDQYADLFLAAKNLSDAILLSDILRVNTEITKAPLSASMIKRY
DEHHQDLTLLKALVRQQLPEKYKEIFFDQSKNGYAGYIDGGASQEEFYKFIKPILEK
MDGTEELLVKLNREDLLRKQRTFDNGSIPHQIHLGELHAILRRQEDFYPFLKDNREKI
EKILTFRIPYYVGPLARGNSRFAWMTRKSEETITPWNFEEVVDKGASAQSFIERMTNF
DKNLPNEKVLPKHSLLYEYFTVYNELTKVKYVTEGMRKPAFLSGEQKKAIVDLLFK
TNRKVTVKQLKEDYFKKIECFDSVEISGVEDRFNASLGTYHDLLKIIKDKDFLDNEEN
EDILEDIVLTLTLFEDREMIEERLKTYAHLFDDKVMKQLKRRRYTGWGRLSRKLINGI
RDKQSGKTILDFLKSDGFANRNFMQLIHDDSLTFKEDIQKAQVSGQGDSLHEHIANL
AGSPAIKKGILQTVKVVDELVKVMGRHKPENIVIEMARENQTTQKGQKNSRERMKR
IEEGIKELGSQILKEHPVENTQLQNEKLYLYYLQNGRDMYVDQELDINRLSDYDVDH
IVPQSFLKDDSIDNKVLTRSDKNRGKSDNVPSEEVVKKMKNYWRQLLNAKLITQRK
FDNLTKAERGGLSELDKAGFIKRQLVETRQITKHVAQILDSRMNTKYDENDKLIREV
KVITLKSKLVSDFRKDFQFYKVREINNYHHAHDAYLNAVVGTALIKKYPKLESEFVY
GDYKVYDVRKMIAKSEQEIGKATAKYFFYSNIMNFFKTEITLANGEIRKRPLIETNGE
TGEIVWDKGRDFATVRKVLSMPQVNIVKKTEVQTGGFSKESILPKRNSDKLIARKKD
WDPKKYGGFDSPTVAYSVLVVAKVEKGKSKKLKSVKELLGITIMERSSFEKNPIDFL
EAKGYKEVKKDLIIKLPKYSLFELENGRKRMLASAGELQKGNELALPSKYVNFLYLA
SHYEKLKGSPEDNEQKQLFVEQHKHYLDEIIEQISEFSKRVILADANLDKVLSAYNKH
RDKPIREQAENIIHLFTLTNLGAPAAFKYFDTTIDRKRYTSTKEVLDATLIHQSITGLYE
TRIDLSQLGGDSGGSPKKKRKV
ecTadA(D108N)-XTEN-nCas9-NLS: (mammalian construct, active on DNA, A to G
editing):
(SEQ ID NO: 154)
MSEVEFSHEYWMRHALTLAKRAWDEREVPVGAVLVHNNRVIGEGWNRPIGRH
DPTAHAEIMALRQGGLVMQNYRLIDATLYVTLEPCVMCAGAMIHSRIGRVVFG
AR [symbol] AKTGAAGSLMDVLHHPGMNHRVEITEGILADECAALLSDFFRMRRQEIKA
QKKAQSSTDSGSETPGTSESATPESDKKYSIGLAIGTNSVGWAVITDEYKVPSKKFKV
LGNTDRHSIKKNLIGALLFDSGETAEATRLKRTARRRYTRRKNRICYLQEIFSNEMAK
VDDSFFHRLEESFLVEEDKKHERHPIFGNIVDEVAYHEKYPTIYHLRKKLVDSTDKAD
LRLIYLALAHMIKFRGHFLIEGDLNPDNSDVDKLFIQLVQTYNQLFEENPINASGVDA
KAILSARLSKSRRLENLIAQLPGEKKNGLFGNLIALSLGLTPNFKSNFDLAEDAKLQLS
KDTYDDDLDNLLAQIGDQYADLFLAAKNLSDAILLSDILRVNTEITKAPLSASMIKRY
DEHHQDLTLLKALVRQQLPEKYKEIFFDQSKNGYAGYIDGGASQEEFYKFIKPILEK
MDGTEELLVKLNREDLLRKQRTFDNGSIPHQIHLGELHAILRRQEDFYPFLKDNREKI
EKILTFRIPYYVGPLARGNSRFAWMTRKSEETITPWNFEEVVDKGASAQSFIERMTNF
DKNLPNEKVLPKHSLLYEYFTVYNELTKVKYVTEGMRKPAFLSGEQKKAIVDLLFK
TNRKVTVKQLKEDYFKKIECFDSVEISGVEDRFNASLGTYHDLLKIIKDKDFLDNEEN
EDILEDIVLTLTLFEDREMIEERLKTYAHLFDDKVMKQLKRRRYTGWGRLSRKLINGI
RDKQSGKTILDFLKSDGFANRNFMQLIHDDSLTFKEDIQKAQVSGQGDSLHEHIANL
AGSPAIKKGILQTVKVVDELVKVMGRHKPENIVIEMARENQTTQKGQKNSRERMKR
IEEGIKELGSQILKEHPVENTQLQNEKLYLYYLQNGRDMYVDQELDINRLSDYDVDH
IVPQSFLKDDSIDNKVLTRSDKNRGKSDNVPSEEVVKKMKNYWRQLLNAKLITQRK
FDNLTKAERGGLSELDKAGFIKRQLVETRQITKHVAQILDSRMNTKYDENDKLIREV
KVITLKSKLVSDFRKDFQFYKVREINNYHHAHDAYLNAVVGTALIKKYPKLESEFVY
GDYKVYDVRKMIAKSEQEIGKATAKYFFYSNIMNFFKTEITLANGEIRKRPLIETNGE
TGEIVWDKGRDFATVRKVLSMPQVNIVKKTEVQTGGFSKESILPKRNSDKLIARKKD
WDPKKYGGFDSPTVAYSVLVVAKVEKGKSKKLKSVKELLGITIMERSSFEKNPIDFL
EAKGYKEVKKDLIIKLPKYSLFELENGRKRMLASAGELQKGNELALPSKYVNFLYLA
SHYEKLKGSPEDNEQKQLFVEQHKHYLDEIIEQISEFSKRVILADANLDKVLSAYNKH
RDKPIREQAENIIHLFTLTNLGAPAAFKYFDTTIDRKRYTSTKEVLDATLIHQSITGLYE
TRIDLSQLGGDSGGSPKKKRKV
ecTadA(D108G)-XTEN-nCas9-NLS: (mammalian construct, active on DNA, A to G
editing):
(SEQ ID NO: 155)
MSEVEFSHEYWMRHALTLAKRAWDEREVPVGAVLVHNNRVIGEGWNRPIGRH
DPTAHAEIMALRQGGLVMQNYRLIDATLYVTLEPCVMCAGAMIHSRIGRVVFG
AR [symbol] AKTGAAGSLMDVLHHPGMNHRVEITEGILADECAALLSDFFRMRRQEIKA
QKKAQSSTDSGSETPGTSESATPESDKKYSIGLAIGTNSVGWAVITDEYKVPSKKFKV
LGNTDRHSIKKNLIGALLFDSGETAEATRLKRTARRRYTRRKNRICYLQEIFSNEMAK
VDDSFFHRLEESFLVEEDKKHERHPIFGNIVDEVAYHEKYPTIYHLRKKLVDSTDKAD
LRLIYLALAHMIKFRGHFLIEGDLNPDNSDVDKLFIQLVQTYNQLFEENPINASGVDA
KAILSARLSKSRRLENLIAQLPGEKKNGLFGNLIALSLGLTPNFKSNFDLAEDAKLQLS
KDTYDDDLDNLLAQIGDQYADLFLAAKNLSDAILLSDILRVNTEITKAPLSASMIKRY
DEHHQDLTLLKALVRQQLPEKYKEIFFDQSKNGYAGYIDGGASQEEFYKFIKPILEK
MDGTEELLVKLNREDLLRKQRTFDNGSIPHQIHLGELHAILRRQEDFYPFLKDNREKI
EKILTFRIPYYVGPLARGNSRFAWMTRKSEETITPWNFEEVVDKGASAQSFIERMTNF
DKNLPNEKVLPKHSLLYEYFTVYNELTKVKYVTEGMRKPAFLSGEQKKAIVDLLFK
TNRKVTVKQLKEDYFKKIECFDSVEISGVEDRFNASLGTYHDLLKIIKDKDFLDNEEN
EDILEDIVLTLTLFEDREMIEERLKTYAHLFDDKVMKQLKRRRYTGWGRLSRKLINGI
RDKQSGKTILDFLKSDGFANRNFMQLIHDDSLTFKEDIQKAQVSGQGDSLHEHIANL
AGSPAIKKGILQTVKVVDELVKVMGRHKPENIVIEMARENQTTQKGQKNSRERMKR
IEEGIKELGSQILKEHPVENTQLQNEKLYLYYLQNGRDMYVDQELDINRLSDYDVDH
IVPQSFLKDDSIDNKVLTRSDKNRGKSDNVPSEEVVKKMKNYWRQLLNAKLITQRK
FDNLTKAERGGLSELDKAGFIKRQLVETRQITKHVAQILDSRMNTKYDENDKLIREV
KVITLKSKLVSDFRKDFQFYKVREINNYHHAHDAYLNAVVGTALIKKYPKLESEFVY
GDYKVYDVRKMIAKSEQEIGKATAKYFFYSNIMNFFKTEITLANGEIRKRPLIETNGE
TGEIVWDKGRDFATVRKVLSMPQVNIVKKTEVQTGGFSKESILPKRNSDKLIARKKD
WDPKKYGGFDSPTVAYSVLVVAKVEKGKSKKLKSVKELLGITIMERSSFEKNPIDFL
EAKGYKEVKKDLIIKLPKYSLFELENGRKRMLASAGELQKGNELALPSKYVNFLYLA
SHYEKLKGSPEDNEQKQLFVEQHKHYLDEIIEQISEFSKRVILADANLDKVLSAYNKH
RDKPIREQAENIIHLFTLTNLGAPAAFKYFDTTIDRKRYTSTKEVLDATLIHQSITGLYE
TRIDLSQLGGDSGGSPKKKRKV
ecTadA(D108V)-XTEN-nCas9-NLS: (mammalian construct, active on DNA, A to G
editing):
(SEQ ID NO: 156)
MSEVEFSHEYWMRHALTLAKRAWDEREVPVGAVLVHNNRVIGEGWNRPIGRH
DPTAHAEIMALRQGGLVMQNYRLIDATLYVTLEPCVMCAGAMIHSRIGRVVFG
AR [symbol] AKTGAAGSLMDVLHHPGMNHRVEITEGILADECAALLSDFFRMRRQEIKA
QKKAQSSTDSGSETPGTSESATPESDKKYSIGLAIGTNSVGWAVITDEYKVPSKKFKV
LGNTDRHSIKKNLIGALLFDSGETAEATRLKRTARRRYTRRKNRICYLQEIFSNEMAK
VDDSFFHRLEESFLVEEDKKHERHPIFGNIVDEVAYHEKYPTIYHLRKKLVDSTDKAD
LRLIYLALAHMIKFRGHFLIEGDLNPDNSDVDKLFIQLVQTYNQLFEENPINASGVDA
KAILSARLSKSRRLENLIAQLPGEKKNGLFGNLIALSLGLTPNFKSNFDLAEDAKLQLS
KDTYDDDLDNLLAQIGDQYADLFLAAKNLSDAILLSDILRVNTEITKAPLSASMIKRY
DEHHQDLTLLKALVRQQLPEKYKEIFFDQSKNGYAGYIDGGASQEEFYKFIKPILEK
MDGTEELLVKLNREDLLRKQRTFDNGSIPHQIHLGELHAILRRQEDFYPFLKDNREKI
EKILTFRIPYYVGPLARGNSRFAWMTRKSEETITPWNFEEVVDKGASAQSFIERMTNF
DKNLPNEKVLPKHSLLYEYFTVYNELTKVKYVTEGMRKPAFLSGEQKKAIVDLLFK
TNRKVTVKQLKEDYFKKIECFDSVEISGVEDRFNASLGTYHDLLKIIKDKDFLDNEEN
EDILEDIVLTLTLFEDREMIEERLKTYAHLFDDKVMKQLKRRRYTGWGRLSRKLINGI
RDKQSGKTILDFLKSDGFANRNFMQLIHDDSLTFKEDIQKAQVSGQGDSLHEHIANL
AGSPAIKKGILQTVKVVDELVKVMGRHKPENIVIEMARENQTTQKGQKNSRERMKR
IEEGIKELGSQILKEHPVENTQLQNEKLYLYYLQNGRDMYVDQELDINRLSDYDVDH
IVPQSFLKDDSIDNKVLTRSDKNRGKSDNVPSEEVVKKMKNYWRQLLNAKLITQRK
FDNLTKAERGGLSELDKAGFIKRQLVETRQITKHVAQILDSRMNTKYDENDKLIREV
KVITLKSKLVSDFRKDFQFYKVREINNYHHAHDAYLNAVVGTALIKKYPKLESEFVY
GDYKVYDVRKMIAKSEQEIGKATAKYFFYSNIMNFFKTEITLANGEIRKRPLIETNGE
TGEIVWDKGRDFATVRKVLSMPQVNIVKKTEVQTGGFSKESILPKRNSDKLIARKKD
WDPKKYGGFDSPTVAYSVLVVAKVEKGKSKKLKSVKELLGITIMERSSFEKNPIDFL
EAKGYKEVKKDLIIKLPKYSLFELENGRKRMLASAGELQKGNELALPSKYVNFLYLA
SHYEKLKGSPEDNEQKQLFVEQHKHYLDEIIEQISEFSKRVILADANLDKVLSAYNKH
RDKPIREQAENIIHLFTLTNLGAPAAFKYFDTTIDRKRYTSTKEVLDATLIHQSITGLYE
TRIDLSQLGGDSGGSPKKKRKV
Variant resulting from first round of evolution (in bacteria)
ecTadA(H8Y_D108N_N127S)-XTEN-dCas9:
(SEQ ID NO: 157)
MSEVEFS [symbol] EYWMRHALTLAKRAWDEREVPVGAVLVHNNRVIGEGWNRPIGRH
DPTAHAEIMALRQGGLVMQNYRLIDATLYVTLEPCVMCAGAMIHSRIGRVVFG
AR [symbol] AKTGAAGSLMDVLHHPGM [symbol] HRVEITEGILADECAALLSDFFRMRRQEIKA
QKKAQSSTDSGSETPGTSESATPESDKKYSIGLAIGTNSVGWAVITDEYKVPSKKFKV
LGNTDRHSIKKNLIGALLFDSGETAEATRLKRTARRRYTRRKNRICYLQEIFSNEMAK
VDDSFFHRLEESFLVEEDKKHERHPIFGNIVDEVAYHEKYPTIYHLRKKLVDSTDKAD
LRLIYLALAHMIKFRGHFLIEGDLNPDNSDVDKLFIQLVQTYNQLFEENPINASGVDA
KAILSARLSKSRRLENLIAQLPGEKKNGLFGNLIALSLGLTPNFKSNFDLAEDAKLQLS
KDTYDDDLDNLLAQIGDQYADLFLAAKNLSDAILLSDILRVNTEITKAPLSASMIKRY
DEHHQDLTLLKALVRQQLPEKYKEIFFDQSKNGYAGYIDGGASQEEFYKFIKPILEK
MDGTEELLVKLNREDLLRKQRTFDNGSIPHQIHLGELHAILRRQEDFYPFLKDNREKI
EKILTFRIPYYVGPLARGNSRFAWMTRKSEETITPWNFEEVVDKGASAQSFIERMTNF
DKNLPNEKVLPKHSLLYEYFTVYNELTKVKYVTEGMRKPAFLSGEQKKAIVDLLFK
TNRKVTVKQLKEDYFKKIECFDSVEISGVEDRFNASLGTYHDLLKIIKDKDFLDNEEN
EDILEDIVLTLTLFEDREMIEERLKTYAHLFDDKVMKQLKRRRYTGWGRLSRKLINGI
RDKQSGKTILDFLKSDGFANRNFMQLIHDDSLTFKEDIQKAQVSGQGDSLHEHIANL
AGSPAIKKGILQTVKVVDELVKVMGRHKPENIVIEMARENQTTQKGQKNSRERMKR
IEEGIKELGSQILKEHPVENTQLQNEKLYLYYLQNGRDMYVDQELDINRLSDYDVDA
IVPQSFLKDDSIDNKVLTRSDKNRGKSDNVPSEEVVKKMKNYWRQLLNAKLITQRK
FDNLTKAERGGLSELDKAGFIKRQLVETRQITKHVAQILDSRMNTKYDENDKLIREV
KVITLKSKLVSDFRKDFQFYKVREINNYHHAHDAYLNAVVGTALIKKYPKLESEFVY
GDYKVYDVRKMIAKSEQEIGKATAKYFFYSNIMNFFKTEITLANGEIRKRPLIETNGE
TGEIVWDKGRDFATVRKVLSMPQVNIVKKTEVQTGGFSKESILPKRNSDKLIARKKD
WDPKKYGGFDSPTVAYSVLVVAKVEKGKSKKLKSVKELLGITIMERSSFEKNPIDFL
EAKGYKEVKKDLIIKLPKYSLFELENGRKRMLASAGELQKGNELALPSKYVNFLYLA
SHYEKLKGSPEDNEQKQLFVEQHKHYLDEIIEQISEFSKRVILADANLDKVLSAYNKH
RDKPIREQAENIIHLFTLTNLGAPAAFKYFDTTIDRKRYTSTKEVLDATLIHQSITGLYE
TRIDLSQLGGD
Enriched variants from second round of evolution (in bacteria) ecTadA
(H8Y_D108N_N127S_E155X)-XTEN-dCas9; X = D, G or V:
(SEQ ID NO: 158)
MSEVEFS [symbol] EYWMRHALTLAKRAWDEREVPVGAVLVHNNRVIGEGWNRPIGRH
DPTAHAEIMALRQGGLVMQNYRLIDATLYVTLEPCVMCAGAMIHSRIGRVVFG
AR [symbol] AKTGAAGSLMDVLHHPGM [symbol] HRVEITEGILADECAALLSDFFRMRRQ [symbol] IKA
QKKAQSSTDSGSETPGTSESATPESDKKYSIGLAIGTNSVGWAVITDEYKVPSKKFKV
LGNTDRHSIKKNLIGALLFDSGETAEATRLKRTARRRYTRRKNRICYLQEIFSNEMAK
VDDSFFHRLEESFLVEEDKKHERHPIFGNIVDEVAYHEKYPTIYHLRKKLVDSTDKAD
LRLIYLALAHMIKFRGHFLIEGDLNPDNSDVDKLFIQLVQTYNQLFEENPINASGVDA
KAILSARLSKSRRLENLIAQLPGEKKNGLFGNLIALSLGLTPNFKSNFDLAEDAKLQLS
KDTYDDDLDNLLAQIGDQYADLFLAAKNLSDAILLSDILRVNTEITKAPLSASMIKRY
DEHHQDLTLLKALVRQQLPEKYKEIFFDQSKNGYAGYIDGGASQEEFYKFIKPILEK
MDGTEELLVKLNREDLLRKQRTFDNGSIPHQIHLGELHAILRRQEDFYPFLKDNREKI
EKILTFRIPYYVGPLARGNSRFAWMTRKSEETITPWNFEEVVDKGASAQSFIERMTNF
DKNLPNEKVLPKHSLLYEYFTVYNELTKVKYVTEGMRKPAFLSGEQKKAIVDLLFK
TNRKVTVKQLKEDYFKKIECFDSVEISGVEDRFNASLGTYHDLLKIIKDKDFLDNEEN
EDILEDIVLTLTLFEDREMIEERLKTYAHLFDDKVMKQLKRRRYTGWGRLSRKLINGI
RDKQSGKTILDFLKSDGFANRNFMQLIHDDSLTFKEDIQKAQVSGQGDSLHEHIANL
AGSPAIKKGILQTVKVVDELVKVMGRHKPENIVIEMARENQTTQKGQKNSRERMKR
IEEGIKELGSQILKEHPVENTQLQNEKLYLYYLQNGRDMYVDQELDINRLSDYDVDA
IVPQSFLKDDSIDNKVLTRSDKNRGKSDNVPSEEVVKKMKNYWRQLLNAKLITQRK
FDNLTKAERGGLSELDKAGFIKRQLVETRQITKHVAQILDSRMNTKYDENDKLIREV
KVITLKSKLVSDFRKDFQFYKVREINNYHHAHDAYLNAVVGTALIKKYPKLESEFVY
GDYKVYDVRKMIAKSEQEIGKATAKYFFYSNIMNFFKTEITLANGEIRKRPLIETNGE
TGEIVWDKGRDFATVRKVLSMPQVNIVKKTEVQTGGFSKESILPKRNSDKLIARKKD
WDPKKYGGFDSPTVAYSVLVVAKVEKGKSKKLKSVKELLGITIMERSSFEKNPIDFL
EAKGYKEVKKDLIIKLPKYSLFELENGRKRMLASAGELQKGNELALPSKYVNFLYLA
SHYEKLKGSPEDNEQKQLFVEQHKHYLDEIIEQISEFSKRVILADANLDKVLSAYNKH
RDKPIREQAENIIHLFTLTNLGAPAAFKYFDTTIDRKRYTSTKEVLDATLIHQSITGLYE
TRIDLSQLGGD
ABE7.7: ecTadA_{(wild type)}-(SGGS)₂-XTEN-(SGGS)₂-
ecTadA_{(W23L}_H36L_P48A_R51L_L84F_A106V_D108N_H123Y_S146C_D147Y_R152P_E155V_I156F_K157N)-(SGGS)₂-
XTEN-(SGGS)₂_nCas9_SGGS_NLS
(SEQ ID NO: 159)
MSEVEFSHEYWMRHALTLAKRAWDEREVPVGAVLVHNNRVIGEGWNRPIGRH
DPTAHAEIMALRQGGLVMQNYRLIDATLYVTLEPCVMCAGAMIHSRIGRVVFG
ARDAKTGAAGSLMDVLHHPGMNHRVEITEGILADECAALLSDFFRMRRQEIKA
QKKAQSSTDSGGSSGGSSGSETPGTSESATPESSGGSSGGSSEVEFSHEYWMRHALT
LAKRALDEREVPVGAVLVLNNRVIGEGWNRAIGLHDPTAHAEIMALRQGGLV
MQNYRLIDATLYVTFEPCVMCAGAMIHSRIGRVVFGVRNAKTGAAGSLMDVLH
YPGMNHRVEITEGILADECAALLCYFFRMPRQVFNAQKKAQSSTDSGGSSGGSS
GSETPGTSESATPESSGGSSGGSDKKYSIGLAIGTNSVGWAVITDEYKVPSKKFKVLGN
TDRHSIKKNLIGALLFDSGETAEATRLKRTARRRYTRRKNRICYLQEIFSNEMAKVDD
SFFHRLEESFLVEEDKKHERHPIFGNIVDEVAYHEKYPTIYHLRKKLVDSTDKADLRL
IYLALAHMIKFRGHFLIEGDLNPDNSDVDKLFIQLVQTYNQLFEENPINASGVDAKAI
LSARLSKSRRLENLIAQLPGEKKNGLFGNLIALSLGLTPNFKSNFDLAEDAKLQLSKD
TYDDDLDNLLAQIGDQYADLFLAAKNLSDAILLSDILRVNTEITKAPLSASMIKRYDE
HHQDLTLLKALVRQQLPEKYKEIFFDQSKNGYAGYIDGGASQEEFYKFIKPILEKMD
GTEELLVKLNREDLLRKQRTFDNGSIPHQIHLGELHAILRRQEDFYPFLKDNREKIEKI
LTFRIPYYVGPLARGNSRFAWMTRKSEETITPWNFEEVVDKGASAQSFIERMTNFDK
NLPNEKVLPKHSLLYEYFTVYNELTKVKYVTEGMRKPAFLSGEQKKAIVDLLFKTNR
KVTVKQLKEDYFKKIECFDSVEISGVEDRFNASLGTYHDLLKIIKDKDFLDNEENEDI
LEDIVLTLTLFEDREMIEERLKTYAHLFDDKVMKQLKRRRYTGWGRLSRKLINGIRD
KQSGKTILDFLKSDGFANRNFMQLIHDDSLTFKEDIQKAQVSGQGDSLHEHIANLAG
SPAIKKGILQTVKVVDELVKVMGRHKPENIVIEMARENQTTQKGQKNSRERMKRIEE
GIKELGSQILKEHPVENTQLQNEKLYLYYLQNGRDMYVDQELDINRLSDYDVDHIVP
QSFLKDDSIDNKVLTRSDKNRGKSDNVPSEEVVKKMKNYWRQLLNAKLITQRKFDN
LTKAERGGLSELDKAGFIKRQLVETRQITKHVAQILDSRMNTKYDENDKLIREVKVIT
LKSKLVSDFRKDFQFYKVREINNYHHAHDAYLNAVVGTALIKKYPKLESEFVYGDY
KVYDVRKMIAKSEQEIGKATAKYFFYSNIMNFFKTEITLANGEIRKRPLIETNGETGEI
VWDKGRDFATVRKVLSMPQVNIVKKTEVQTGGFSKESILPKRNSDKLIARKKDWDP
KKYGGFDSPTVAYSVLVVAKVEKGKSKKLKSVKELLGITIMERSSFEKNPIDFLEAK
GYKEVKKDLIIKLPKYSLFELENGRKRMLASAGELQKGNELALPSKYVNFLYLASHY
EKLKGSPEDNEQKQLFVEQHKHYLDEIIEQISEFSKRVILADANLDKVLSAYNKHRDK
PIREQAENIIHLFTLTNLGAPAAFKYFDTTIDRKRYTSTKEVLDATLIHQSITGLYETRI
DLSQLGGDSGGSPKKKRKV
pNMG-624 amino acid sequence: ecTadA_{(wild type)}-32 a.a. linker-
ecTadA_{(W23R}_H36L_P48A_R51L_L84F_A106V_D108N_H123Y_S146C_D147Y_R152P_E155V_I156F_K157N)-24 a.a.
linker_nCas9_SGGS_NLS
(SEQ ID NO: 160)
MSEVEFSHEYWMRHALTLAKRAWDEREVPVGAVLVHNNRVIGEGWNRPIGRH
DPTAHAEIMALRQGGLVMQNYRLIDATLYVTLEPCVMCAGAMIHSRIGRVVFG
ARDAKTGAAGSLMDVLHHPGMNHRVEITEGILADECAALLSDFFRMRRQEIKA
QKKAQSSTDSGGSSGGSSGSETPGTSESATPESSGGSSGGSSEVEFSHEYWMRHALTL
AKRARDEREVPVGAVLVLNNRVIGEGWNRAIGLHDPTAHAEIMALRQGGLVM
QNYRLIDATLYVTFEPCVMCAGAMIHSRIGRVVFGVRNAKTGAAGSLMDVLHY
PGMNHRVEITEGILADECAALLCYFFRMPRQVFNAQKKAQSSTDSGGSSGGSSGS
ETPGTSESATPESDKKYSIGLAIGTNSVGWAVITDEYKVPSKKFKVLGNTDRHSIKKNL
IGALLFDSGETAEATRLKRTARRRYTRRKNRICYLQEIFSNEMAKVDDSFFHRLEESF
LVEEDKKHERHPIFGNIVDEVAYHEKYPTIYHLRKKLVDSTDKADLRLIYLALAHMI
KFRGHFLIEGDLNPDNSDVDKLFIQLVQTYNQLFEENPINASGVDAKAILSARLSKSR
RLENLIAQLPGEKKNGLFGNLIALSLGLTPNFKSNFDLAEDAKLQLSKDTYDDDLDN
LLAQIGDQYADLFLAAKNLSDAILLSDILRVNTEITKAPLSASMIKRYDEHHQDLTLL
KALVRQQLPEKYKEIFFDQSKNGYAGYIDGGASQEEFYKFIKPILEKMDGTEELLVKL
NREDLLRKQRTFDNGSIPHQIHLGELHAILRRQEDFYPFLKDNREKIEKILTFRIPYYV
GPLARGNSRFAWMTRKSEETITPWNFEEVVDKGASAQSFIERMTNFDKNLPNEKVLP
KHSLLYEYFTVYNELTKVKYVTEGMRKPAFLSGEQKKAIVDLLFKTNRKVTVKQLK
EDYFKKIECFDSVEISGVEDRFNASLGTYHDLLKIIKDKDFLDNEENEDILEDIVLTLTL
FEDREMIEERLKTYAHLFDDKVMKQLKRRRYTGWGRLSRKLINGIRDKQSGKTILDF
LKSDGFANRNFMQLIHDDSLTFKEDIQKAQVSGQGDSLHEHIANLAGSPAIKKGILQT
VKVVDELVKVMGRHKPENIVIEMARENQTTQKGQKNSRERMKRIEEGIKELGSQILK
EHPVENTQLQNEKLYLYYLQNGRDMYVDQELDINRLSDYDVDHIVPQSFLKDDSID
NKVLTRSDKNRGKSDNVPSEEVVKKMKNYWRQLLNAKLITQRKFDNLTKAERGGL
SELDKAGFIKRQLVETRQITKHVAQILDSRMNTKYDENDKLIREVKVITLKSKLVSDF
RKDFQFYKVREINNYHHAHDAYLNAVVGTALIKKYPKLESEFVYGDYKVYDVRKM
IAKSEQEIGKATAKYFFYSNIMNFFKTEITLANGEIRKRPLIETNGETGEIVWDKGRDF
ATVRKVLSMPQVNIVKKTEVQTGGFSKESILPKRNSDKLIARKKDWDPKKYGGFDSP
TVAYSVLVVAKVEKGKSKKLKSVKELLGITIMERSSFEKNPIDFLEAKGYKEVKKDLI
IKLPKYSLFELENGRKRMLASAGELQKGNELALPSKYVNFLYLASHYEKLKGSPEDN
EQKQLFVEQHKHYLDEIIEQISEFSKRVILADANLDKVLSAYNKHRDKPIREQAENIIH
LFTLTNLGAPAAFKYFDTTIDRKRYTSTKEVLDATLIHQSITGLYETRIDLSQLGGDSG
GSPKKKRKV
ABE3.2: ecTadA_{(wild-type)}-(SGGS)₂-XTEN-(SGGS)₂-
ecTadA_{(L84F}_A106V_D108N_H123Y_D147Y_E155V_I156F)-(SGGS)₂-XTEN-
(SGGS)₂_nCas9_SGGS_NLS
(SEQ ID NO: 161)
MSEVEFSHEYWMRHALTLAKRAWDEREVPVGAVLVHNNRVIGEGWNRPIGRH
DPTAHAEIMALRQGGLVMQNYRLIDATLYVTLEPCVMCAGAMIHSRIGRVVFG
ARDAKTGAAGSLMDVLHHPGMNHRVEITEGILADECAALLSDFFRMRRQEIKA
QKKAQSSTDSGGSSGGSSGSETPGTSESATPESSGGSSGGSSEVEFSHEYWMRHALT
LAKRAWDEREVPVGAVLVHNNRVIGEGWNRPIGRHDPTAHAEIMALRQGGLV
MQNYRLIDATLYVTFEPCVMCAGAMIHSRIGRVVFGVRNAKTGAAGSLMDVLH
YPGMNHRVEITEGILADECAALLSYFFRMRRQVFKAQKKAQSSTDSGGSSGGSS
GSETPGTSESATPESSGGSSGGSDKKYSIGLAIGTNSVGWAVITDEYKVPSKKFKVLGN
TDRHSIKKNLIGALLFDSGETAEATRLKRTARRRYTRRKNRICYLQEIFSNEMAKVDD
SFFHRLEESFLVEEDKKHERHPIFGNIVDEVAYHEKYPTIYHLRKKLVDSTDKADLRL
IYLALAHMIKFRGHFLIEGDLNPDNSDVDKLFIQLVQTYNQLFEENPINASGVDAKAI
LSARLSKSRRLENLIAQLPGEKKNGLFGNLIALSLGLTPNFKSNFDLAEDAKLQLSKD
TYDDDLDNLLAQIGDQYADLFLAAKNLSDAILLSDILRVNTEITKAPLSASMIKRYDE
HHQDLTLLKALVRQQLPEKYKEIFFDQSKNGYAGYIDGGASQEEFYKFIKPILEKMD
GTEELLVKLNREDLLRKQRTFDNGSIPHQIHLGELHAILRRQEDFYPFLKDNREKIEKI
LTFRIPYYVGPLARGNSRFAWMTRKSEETITPWNFEEVVDKGASAQSFIERMTNFDK
NLPNEKVLPKHSLLYEYFTVYNELTKVKYVTEGMRKPAFLSGEQKKAIVDLLFKTNR
KVTVKQLKEDYFKKIECFDSVEISGVEDRFNASLGTYHDLLKIIKDKDFLDNEENEDI
LEDIVLTLTLFEDREMIEERLKTYAHLFDDKVMKQLKRRRYTGWGRLSRKLINGIRD
KQSGKTILDFLKSDGFANRNFMQLIHDDSLTFKEDIQKAQVSGQGDSLHEHIANLAG
SPAIKKGILQTVKVVDELVKVMGRHKPENIVIEMARENQTTQKGQKNSRERMKRIEE
GIKELGSQILKEHPVENTQLQNEKLYLYYLQNGRDMYVDQELDINRLSDYDVDHIVP
QSFLKDDSIDNKVLTRSDKNRGKSDNVPSEEVVKKMKNYWRQLLNAKLITQRKFDN
LTKAERGGLSELDKAGFIKRQLVETRQITKHVAQILDSRMNTKYDENDKLIREVKVIT
LKSKLVSDFRKDFQFYKVREINNYHHAHDAYLNAVVGTALIKKYPKLESEFVYGDY
KVYDVRKMIAKSEQEIGKATAKYFFYSNIMNFFKTEITLANGEIRKRPLIETNGETGEI
VWDKGRDFATVRKVLSMPQVNIVKKTEVQTGGFSKESILPKRNSDKLIARKKDWDP
KKYGGFDSPTVAYSVLVVAKVEKGKSKKLKSVKELLGITIMERSSFEKNPIDFLEAK
GYKEVKKDLIIKLPKYSLFELENGRKRMLASAGELQKGNELALPSKYVNFLYLASHY
EKLKGSPEDNEQKQLFVEQHKHYLDEIIEQISEFSKRVILADANLDKVLSAYNKHRDK
PIREQAENIIHLFTLTNLGAPAAFKYFDTTIDRKRYTSTKEVLDATLIHQSITGLYETRI
DLSQLGGDSGGSPKKKRKV
ABE5.3: ecTadA_{(wild-type)}-(SGGS)₂-XTEN-(SGGS)₂-
ecTadA_{(H36L}_R51L_L84F_A106V_D108N_H123Y_S146C_D147Y_E155V_I156F_K157N)-(SGGS)₂-XTEN-
(SGGS)₂_nCas9_SGGS_NLS
(SEQ ID NO: 162)
MSEVEFSHEYWMRHALTLAKRAWDEREVPVGAVLVHNNRVIGEGWNRPIGRH
DPTAHAEIMALRQGGLVMQNYRLIDATLYVTLEPCVMCAGAMIHSRIGRVVFG
ARDAKTGAAGSLMDVLHHPGMNHRVEITEGILADECAALLSDFFRMRRQEIKA
QKKAQSSTDSGGSSGGSSGSETPGTSESATPESSGGSSGGSSEVEFSHEYWMRHALT
LAKRAWDEREVPVGAVLVLNNRVIGEGWNRPIGLHDPTAHAEIMALRQGGLV
MQNYRLIDATLYVTFEPCVMCAGAMIHSRIGRVVFGVRNAKTGAAGSLMDVLH
YPGMNHRVEITEGILADECAALLCYFFRMRRQVFNAQKKAQSSTDSGGSSGGSS
GSETPGTSESATPESSGGSSGGSDKKYSIGLAIGTNSVGWAVITDEYKVPSKKFKVLGN
TDRHSIKKNLIGALLFDSGETAEATRLKRTARRRYTRRKNRICYLQEIFSNEMAKVDD
SFFHRLEESFLVEEDKKHERHPIFGNIVDEVAYHEKYPTIYHLRKKLVDSTDKADLRL
IYLALAHMIKFRGHFLIEGDLNPDNSDVDKLFIQLVQTYNQLFEENPINASGVDAKAI
LSARLSKSRRLENLIAQLPGEKKNGLFGNLIALSLGLTPNFKSNFDLAEDAKLQLSKD
TYDDDLDNLLAQIGDQYADLFLAAKNLSDAILLSDILRVNTEITKAPLSASMIKRYDE
HHQDLTLLKALVRQQLPEKYKEIFFDQSKNGYAGYIDGGASQEEFYKFIKPILEKMD
GTEELLVKLNREDLLRKQRTFDNGSIPHQIHLGELHAILRRQEDFYPFLKDNREKIEKI
LTFRIPYYVGPLARGNSRFAWMTRKSEETITPWNFEEVVDKGASAQSFIERMTNFDK
NLPNEKVLPKHSLLYEYFTVYNELTKVKYVTEGMRKPAFLSGEQKKAIVDLLFKTNR
KVTVKQLKEDYFKKIECFDSVEISGVEDRFNASLGTYHDLLKIIKDKDFLDNEENEDI
LEDIVLTLTLFEDREMIEERLKTYAHLFDDKVMKQLKRRRYTGWGRLSRKLINGIRD
KQSGKTILDFLKSDGFANRNFMQLIHDDSLTFKEDIQKAQVSGQGDSLHEHIANLAG
SPAIKKGILQTVKVVDELVKVMGRHKPENIVIEMARENQTTQKGQKNSRERMKRIEE
GIKELGSQILKEHPVENTQLQNEKLYLYYLQNGRDMYVDQELDINRLSDYDVDHIVP
QSFLKDDSIDNKVLTRSDKNRGKSDNVPSEEVVKKMKNYWRQLLNAKLITQRKFDN
LTKAERGGLSELDKAGFIKRQLVETRQITKHVAQILDSRMNTKYDENDKLIREVKVIT
LKSKLVSDFRKDFQFYKVREINNYHHAHDAYLNAVVGTALIKKYPKLESEFVYGDY
KVYDVRKMIAKSEQEIGKATAKYFFYSNIMNFFKTEITLANGEIRKRPLIETNGETGEI
VWDKGRDFATVRKVLSMPQVNIVKKTEVQTGGFSKESILPKRNSDKLIARKKDWDP
KKYGGFDSPTVAYSVLVVAKVEKGKSKKLKSVKELLGITIMERSSFEKNPIDFLEAK
GYKEVKKDLIIKLPKYSLFELENGRKRMLASAGELQKGNELALPSKYVNFLYLASHY
EKLKGSPEDNEQKQLFVEQHKHYLDEIIEQISEFSKRVILADANLDKVLSAYNKHRDK
PIREQAENIIHLFTLTNLGAPAAFKYFDTTIDRKRYTSTKEVLDATLIHQSITGLYETRI
DLSQLGGDSGGSPKKKRKV
pNMG-558 amino acid sequence: ecTadA_{(wild-type)}- 32 a.a. linker-
ecTadA_{(H36L}_R51L_L84F_A106V_D108N_H123Y_S146C_D147Y_E155V_I156F_K157N)- 24 a.a.
linker_nCas9_SGGS_NLS
(SEQ ID NO: 163)
MSEVEFSHEYWMRHALTLAKRAWDEREVPVGAVLVHNNRVIGEGWNRPIGRH
DPTAHAEIMALRQGGLVMQNYRLIDATLYVTLEPCVMCAGAMIHSRIGRVVFG
ARDAKTGAAGSLMDVLHHPGMNHRVEITEGILADECAALLSDFFRMRRQEIKA
QKKAQSSTDSGGSSGGSSGSETPGTSESATPESSGGSSGGSSEVEFSHEYWMRHALTL
AKRAWDEREVPVGAVLVLNNRVIGEGWNRPIGLHDPTAHAEIMALRQGGLVM
QNYRLIDATLYVTFEPCVMCAGAMIHSRIGRVVFGVRNAKTGAAGSLMDVLHY
PGMNHRVEITEGILADECAALLCYFFRMRRQVFNAQKKAQSSTDSGGSSGGSSGS
ETPGTSESATPESDKKYSIGLAIGTNSVGWAVITDEYKVPSKKFKVLGNTDRHSIKKNL
IGALLFDSGETAEATRLKRTARRRYTRRKNRICYLQEIFSNEMAKVDDSFFHRLEESF
LVEEDKKHERHPIFGNIVDEVAYHEKYPTIYHLRKKLVDSTDKADLRLIYLALAHMI
KFRGHFLIEGDLNPDNSDVDKLFIQLVQTYNQLFEENPINASGVDAKAILSARLSKSR
RLENLIAQLPGEKKNGLFGNLIALSLGLTPNFKSNFDLAEDAKLQLSKDTYDDDLDN
LLAQIGDQYADLFLAAKNLSDAILLSDILRVNTEITKAPLSASMIKRYDEHHQDLTLL
KALVRQQLPEKYKEIFFDQSKNGYAGYIDGGASQEEFYKFIKPILEKMDGTEELLVKL
NREDLLRKQRTFDNGSIPHQIHLGELHAILRRQEDFYPFLKDNREKIEKILTFRIPYYV
GPLARGNSRFAWMTRKSEETITPWNFEEVVDKGASAQSFIERMTNFDKNLPNEKVLP
KHSLLYEYFTVYNELTKVKYVTEGMRKPAFLSGEQKKAIVDLLFKTNRKVTVKQLK
EDYFKKIECFDSVEISGVEDRFNASLGTYHDLLKIIKDKDFLDNEENEDILEDIVLTLTL
FEDREMIEERLKTYAHLFDDKVMKQLKRRRYTGWGRLSRKLINGIRDKQSGKTILDF
LKSDGFANRNFMQLIHDDSLTFKEDIQKAQVSGQGDSLHEHIANLAGSPAIKKGILQT
VKVVDELVKVMGRHKPENIVIEMARENQTTQKGQKNSRERMKRIEEGIKELGSQILK
EHPVENTQLQNEKLYLYYLQNGRDMYVDQELDINRLSDYDVDHIVPQSFLKDDSID
NKVLTRSDKNRGKSDNVPSEEVVKKMKNYWRQLLNAKLITQRKFDNLTKAERGGL
SELDKAGFIKRQLVETRQITKHVAQILDSRMNTKYDENDKLIREVKVITLKSKLVSDF
RKDFQFYKVREINNYHHAHDAYLNAVVGTALIKKYPKLESEFVYGDYKVYDVRKM
IAKSEQEIGKATAKYFFYSNIMNFFKTEITLANGEIRKRPLIETNGETGEIVWDKGRDF
ATVRKVLSMPQVNIVKKTEVQTGGFSKESILPKRNSDKLIARKKDWDPKKYGGFDSP
TVAYSVLVVAKVEKGKSKKLKSVKELLGITIMERSSFEKNPIDFLEAKGYKEVKKDLI
IKLPKYSLFELENGRKRMLASAGELQKGNELALPSKYVNFLYLASHYEKLKGSPEDN
EQKQLFVEQHKHYLDEIIEQISEFSKRVILADANLDKVLSAYNKHRDKPIREQAENIIH
LFTLTNLGAPAAFKYFDTTIDRKRYTSTKEVLDATLIHQSITGLYETRIDLSQLGGDSG
GSPKKKRKV
pNMG-576 amino acid sequence: ecTadA_{(wild-type)}-(SGGS)₂-XTEN-(SGGS)₂-
ecTadA_{(H36L}_P48S_R51L_L84F_A106V_D108N_H123Y_S146C_D147Y_E155V_I156F_K157N)(SGGS)₂-XTEN-
(SGGS)₂_nCas9_GGS_NLS
(SEQ ID NO: 164)
MSEVEFSHEYWMRHALTLAKRAWDEREVPVGAVLVHNNRVIGEGWNRPIGRH
DPTAHAEIMALRQGGLVMQNYRLIDATLYVTLEPCVMCAGAMIHSRIGRVVFG
ARDAKTGAAGSLMDVLHHPGMNHRVEITEGILADECAALLSDFFRMRRQEIKA
QKKAQSSTDSGGSSGGSSGSETPGTSESATPESSGGSSGGSSEVEFSHEYWMRHALT
LAKRAWDEREVPVGAVLVLNNRVIGEGWNRSIGLHDPTAHAEIMALRQGGLV
MQNYRLIDATLYVTFEPCVMCAGAMIHSRIGRVVFGVRNAKTGAAGSLMDVLH
YPGMNHRVEITEGILADECAALLCYFFRMRRQVFNAQKKAQSSTDSGGSSGGSS
GSETPGTSESATPESSGGSSGGSDKKYSIGLAIGTNSVGWAVITDEYKVPSKKFKVLGN
TDRHSIKKNLIGALLFDSGETAEATRLKRTARRRYTRRKNRICYLQEIFSNEMAKVDD
SFFHRLEESFLVEEDKKHERHPIFGNIVDEVAYHEKYPTIYHLRKKLVDSTDKADLRL
IYLALAHMIKFRGHFLIEGDLNPDNSDVDKLFIQLVQTYNQLFEENPINASGVDAKAI
LSARLSKSRRLENLIAQLPGEKKNGLFGNLIALSLGLTPNFKSNFDLAEDAKLQLSKD
TYDDDLDNLLAQIGDQYADLFLAAKNLSDAILLSDILRVNTEITKAPLSASMIKRYDE
HHQDLTLLKALVRQQLPEKYKEIFFDQSKNGYAGYIDGGASQEEFYKFIKPILEKMD
GTEELLVKLNREDLLRKQRTFDNGSIPHQIHLGELHAILRRQEDFYPFLKDNREKIEKI
LTFRIPYYVGPLARGNSRFAWMTRKSEETITPWNFEEVVDKGASAQSFIERMTNFDK
NLPNEKVLPKHSLLYEYFTVYNELTKVKYVTEGMRKPAFLSGEQKKAIVDLLFKTNR
KVTVKQLKEDYFKKIECFDSVEISGVEDRFNASLGTYHDLLKIIKDKDFLDNEENEDI
LEDIVLTLTLFEDREMIEERLKTYAHLFDDKVMKQLKRRRYTGWGRLSRKLINGIRD
KQSGKTILDFLKSDGFANRNFMQLIHDDSLTFKEDIQKAQVSGQGDSLHEHIANLAG
SPAIKKGILQTVKVVDELVKVMGRHKPENIVIEMARENQTTQKGQKNSRERMKRIEE
GIKELGSQILKEHPVENTQLQNEKLYLYYLQNGRDMYVDQELDINRLSDYDVDHIVP
QSFLKDDSIDNKVLTRSDKNRGKSDNVPSEEVVKKMKNYWRQLLNAKLITQRKFDN
LTKAERGGLSELDKAGFIKRQLVETRQITKHVAQILDSRMNTKYDENDKLIREVKVIT
LKSKLVSDFRKDFQFYKVREINNYHHAHDAYLNAVVGTALIKKYPKLESEFVYGDY
KVYDVRKMIAKSEQEIGKATAKYFFYSNIMNFFKTEITLANGEIRKRPLIETNGETGEI
VWDKGRDFATVRKVLSMPQVNIVKKTEVQTGGFSKESILPKRNSDKLIARKKDWDP
KKYGGFDSPTVAYSVLVVAKVEKGKSKKLKSVKELLGITIMERSSFEKNPIDFLEAK
GYKEVKKDLIIKLPKYSLFELENGRKRMLASAGELQKGNELALPSKYVNFLYLASHY
EKLKGSPEDNEQKQLFVEQHKHYLDEIIEQISEFSKRVILADANLDKVLSAYNKHRDK
PIREQAENIIHLFTLTNLGAPAAFKYFDTTIDRKRYTSTKEVLDATLIHQSITGLYETRI
DLSQLGGDSGGSPKKKRKV
pNMG-577 amino acid sequence: ecTadA_{(wild-type)}-(SGGS)₂-XTEN-(SGGS)₂-
ecTadA_{(H36L}_P48S_R51L_L84F_A106V_D108N_H123Y_A142N_S146C_D147Y_E155V_I156F_K157N)-(SGGS)₂-
XTEN-(SGGS)₂_nCas9_GGS_NLS
(SEQ ID NO: 165)
MSEVEFSHEYWMRHALTLAKRAWDEREVPVGAVLVHNNRVIGEGWNRPIGRH
DPTAHAEIMALRQGGLVMQNYRLIDATLYVTLEPCVMCAGAMIHSRIGRVVFG
ARDAKTGAAGSLMDVLHHPGMNHRVEITEGILADECAALLSDFFRMRRQEIKA
QKKAQSSTDSGGSSGGSSGSETPGTSESATPESSGGSSGGSSEVEFSHEYWMRHALT
LAKRAWDEREVPVGAVLVLNNRVIGEGWNRSIGLHDPTAHAEIMALRQGGLV
MQNYRLIDATLYVTFEPCVMCAGAMIHSRIGRVVFGVRNAKTGAAGSLMDVLH
YPGMNHRVEITEGILADECNALLCYFFRMRRQVFNAQKKAQSSTDSGGSSGGSS
GSETPGTSESATPESSGGSSGGSDKKYSIGLAIGTNSVGWAVITDEYKVPSKKFKVLGN
TDRHSIKKNLIGALLFDSGETAEATRLKRTARRRYTRRKNRICYLQEIFSNEMAKVDD
SFFHRLEESFLVEEDKKHERHPIFGNIVDEVAYHEKYPTIYHLRKKLVDSTDKADLRL
IYLALAHMIKFRGHFLIEGDLNPDNSDVDKLFIQLVQTYNQLFEENPINASGVDAKAI
LSARLSKSRRLENLIAQLPGEKKNGLFGNLIALSLGLTPNFKSNFDLAEDAKLQLSKD
TYDDDLDNLLAQIGDQYADLFLAAKNLSDAILLSDILRVNTEITKAPLSASMIKRYDE
HHQDLTLLKALVRQQLPEKYKEIFFDQSKNGYAGYIDGGASQEEFYKFIKPILEKMD
GTEELLVKLNREDLLRKQRTFDNGSIPHQIHLGELHAILRRQEDFYPFLKDNREKIEKI
LTFRIPYYVGPLARGNSRFAWMTRKSEETITPWNFEEVVDKGASAQSFIERMTNFDK
NLPNEKVLPKHSLLYEYFTVYNELTKVKYVTEGMRKPAFLSGEQKKAIVDLLFKTNR
KVTVKQLKEDYFKKIECFDSVEISGVEDRFNASLGTYHDLLKIIKDKDFLDNEENEDI
LEDIVLTLTLFEDREMIEERLKTYAHLFDDKVMKQLKRRRYTGWGRLSRKLINGIRD
KQSGKTILDFLKSDGFANRNFMQLIHDDSLTFKEDIQKAQVSGQGDSLHEHIANLAG
SPAIKKGILQTVKVVDELVKVMGRHKPENIVIEMARENQTTQKGQKNSRERMKRIEE
GIKELGSQILKEHPVENTQLQNEKLYLYYLQNGRDMYVDQELDINRLSDYDVDHIVP
QSFLKDDSIDNKVLTRSDKNRGKSDNVPSEEVVKKMKNYWRQLLNAKLITQRKFDN
LTKAERGGLSELDKAGFIKRQLVETRQITKHVAQILDSRMNTKYDENDKLIREVKVIT
LKSKLVSDFRKDFQFYKVREINNYHHAHDAYLNAVVGTALIKKYPKLESEFVYGDY
KVYDVRKMIAKSEQEIGKATAKYFFYSNIMNFFKTEITLANGEIRKRPLIETNGETGEI
VWDKGRDFATVRKVLSMPQVNIVKKTEVQTGGFSKESILPKRNSDKLIARKKDWDP
KKYGGFDSPTVAYSVLVVAKVEKGKSKKLKSVKELLGITIMERSSFEKNPIDFLEAK
GYKEVKKDLIIKLPKYSLFELENGRKRMLASAGELQKGNELALPSKYVNFLYLASHY
EKLKGSPEDNEQKQLFVEQHKHYLDEIIEQISEFSKRVILADANLDKVLSAYNKHRDK
PIREQAENIIHLFTLTNLGAPAAFKYFDTTIDRKRYTSTKEVLDATLIHQSITGLYETRI
DLSQLGGDSGGSPKKKRKV
pNMG-586 amino acid sequence: ecTadA_{(wild-type)}-(SGGS)₂-XTEN-(SGGS)₂-
ecTadA_{(H36L}_P48A_R51L_L84F_A106V_D108N_H123Y_S146C_D147Y_E155V_I156F_K157N)-(SGGS)₂-XTEN-
(SGGS)₂_nCas9_GGS_NLS
(SEQ ID NO: 166)
MSEVEFSHEYWMRHALTLAKRAWDEREVPVGAVLVHNNRVIGEGWNRPIGRH
DPTAHAEIMALRQGGLVMQNYRLIDATLYVTLEPCVMCAGAMIHSRIGRVVFG
ARDAKTGAAGSLMDVLHHPGMNHRVEITEGILADECAALLSDFFRMRRQEIKA
QKKAQSSTDSGGSSGGSSGSETPGTSESATPESSGGSSGGSSEVEFSHEYWMRHALT
LAKRAWDEREVPVGAVLVLNNRVIGEGWNRAIGLHDPTAHAEIMALRQGGLV
MQNYRLIDATLYVTFEPCVMCAGAMIHSRIGRVVFGVRNAKTGAAGSLMDVLH
YPGMNHRVEITEGILADECAALLCYFFRMRRQVFNAQKKAQSSTDSGGSSGGSS
GSETPGTSESATPESSGGSSGGSDKKYSIGLAIGTNSVGWAVITDEYKVPSKKFKVLGN
TDRHSIKKNLIGALLFDSGETAEATRLKRTARRRYTRRKNRICYLQEIFSNEMAKVDD
SFFHRLEESFLVEEDKKHERHPIFGNIVDEVAYHEKYPTIYHLRKKLVDSTDKADLRL
IYLALAHMIKFRGHFLIEGDLNPDNSDVDKLFIQLVQTYNQLFEENPINASGVDAKAI
LSARLSKSRRLENLIAQLPGEKKNGLFGNLIALSLGLTPNFKSNFDLAEDAKLQLSKD
TYDDDLDNLLAQIGDQYADLFLAAKNLSDAILLSDILRVNTEITKAPLSASMIKRYDE
HHQDLTLLKALVRQQLPEKYKEIFFDQSKNGYAGYIDGGASQEEFYKFIKPILEKMD
GTEELLVKLNREDLLRKQRTFDNGSIPHQIHLGELHAILRRQEDFYPFLKDNREKIEKI
LTFRIPYYVGPLARGNSRFAWMTRKSEETITPWNFEEVVDKGASAQSFIERMTNFDK
NLPNEKVLPKHSLLYEYFTVYNELTKVKYVTEGMRKPAFLSGEQKKAIVDLLFKTNR
KVTVKQLKEDYFKKIECFDSVEISGVEDRFNASLGTYHDLLKIIKDKDFLDNEENEDI
LEDIVLTLTLFEDREMIEERLKTYAHLFDDKVMKQLKRRRYTGWGRLSRKLINGIRD
KQSGKTILDFLKSDGFANRNFMQLIHDDSLTFKEDIQKAQVSGQGDSLHEHIANLAG
SPAIKKGILQTVKVVDELVKVMGRHKPENIVIEMARENQTTQKGQKNSRERMKRIEE
GIKELGSQILKEHPVENTQLQNEKLYLYYLQNGRDMYVDQELDINRLSDYDVDHIVP
QSFLKDDSIDNKVLTRSDKNRGKSDNVPSEEVVKKMKNYWRQLLNAKLITQRKFDN
LTKAERGGLSELDKAGFIKRQLVETRQITKHVAQILDSRMNTKYDENDKLIREVKVIT
LKSKLVSDFRKDFQFYKVREINNYHHAHDAYLNAVVGTALIKKYPKLESEFVYGDY
KVYDVRKMIAKSEQEIGKATAKYFFYSNIMNFFKTEITLANGEIRKRPLIETNGETGEI
VWDKGRDFATVRKVLSMPQVNIVKKTEVQTGGFSKESILPKRNSDKLIARKKDWDP
KKYGGFDSPTVAYSVLVVAKVEKGKSKKLKSVKELLGITIMERSSFEKNPIDFLEAK
GYKEVKKDLIKLPKYSLFELENGRKRMLASAGELQKGNELALPSKYVNFLYLASHY
EKLKGSPEDNEQKQLFVEQHKHYLDEIIEQISEFSKRVILADANLDKVLSAYNKHRDK
PIREQAENIIHLFTLTNLGAPAAFKYFDTTIDRKRYTSTKEVLDATLIHQSITGLYETRI
DLSQLGGDSGGSPKKKRKV
ABE7.2: ecTadA_{(wild-type)}-(SGGS)₂-XTEN-(SGGS)₂-
ecTadA_{(H36L}_P48A_R51L_L84F_A106V_D108N_H123Y_A142N_S146C_D147Y_E155V_I156F_K157N)-(SGGS)₂-
XTEN-(SGGS)₂_nCas9_GGS_NLS
(SEQ ID NO: 167)
MSEVEFSHEYWMRHALTLAKRAWDEREVPVGAVLVHNNRVIGEGWNRPIGRH
DPTAHAEIMALRQGGLVMQNYRLIDATLYVTLEPCVMCAGAMIHSRIGRVVFG
ARDAKTGAAGSLMDVLHHPGMNHRVEITEGILADECAALLSDFFRMRRQEIKA
QKKAQSSTDSGGSSGGSSGSETPGTSESATPESSGGSSGGSSEVEFSHEYWMRHALT
LAKRAWDEREVPVGAVLVLNNRVIGEGWNRAIGLHDPTAHAEIMALRQGGLV
MQNYRLIDATLYVTFEPCVMCAGAMIHSRIGRVVFGVRNAKTGAAGSLMDVLH
YPGMNHRVEITEGILADECNALLCYFFRMRRQVFNAQKKAQSSTDSGGSSGGSS
GSETPGTSESATPESSGGSSGGSDKKYSIGLAIGTNSVGWAVITDEYKVPSKKFKVLGN
TDRHSIKKNLIGALLFDSGETAEATRLKRTARRRYTRRKNRICYLQEIFSNEMAKVDD
SFFHRLEESFLVEEDKKHERHPIFGNIVDEVAYHEKYPTIYHLRKKLVDSTDKADLRL
IYLALAHMIKFRGHFLIEGDLNPDNSDVDKLFIQLVQTYNQLFEENPINASGVDAKAI
LSARLSKSRRLENLIAQLPGEKKNGLFGNLIALSLGLTPNFKSNFDLAEDAKLQLSKD
TYDDDLDNLLAQIGDQYADLFLAAKNLSDAILLSDILRVNTEITKAPLSASMIKRYDE
HHQDLTLLKALVRQQLPEKYKEIFFDQSKNGYAGYIDGGASQEEFYKFIKPILEKMD
GTEELLVKLNREDLLRKQRTFDNGSIPHQIHLGELHAILRRQEDFYPFLKDNREKIEKI
LTFRIPYYVGPLARGNSRFAWMTRKSEETITPWNFEEVVDKGASAQSFIERMTNFDK
NLPNEKVLPKHSLLYEYFTVYNELTKVKYVTEGMRKPAFLSGEQKKAIVDLLFKTNR
KVTVKQLKEDYFKKIECFDSVEISGVEDRFNASLGTYHDLLKIIKDKDFLDNEENEDI
LEDIVLTLTLFEDREMIEERLKTYAHLFDDKVMKQLKRRRYTGWGRLSRKLINGIRD
KQSGKTILDFLKSDGFANRNFMQLIHDDSLTFKEDIQKAQVSGQGDSLHEHIANLAG
SPAIKKGILQTVKVVDELVKVMGRHKPENIVIEMARENQTTQKGQKNSRERMKRIEE
GIKELGSQILKEHPVENTQLQNEKLYLYYLQNGRDMYVDQELDINRLSDYDVDHIVP
QSFLKDDSIDNKVLTRSDKNRGKSDNVPSEEVVKKMKNYWRQLLNAKLITQRKFDN
LTKAERGGLSELDKAGFIKRQLVETRQITKHVAQILDSRMNTKYDENDKLIREVKVIT
LKSKLVSDFRKDFQFYKVREINNYHHAHDAYLNAVVGTALIKKYPKLESEFVYGDY
KVYDVRKMIAKSEQEIGKATAKYFFYSNIMNFFKTEITLANGEIRKRPLIETNGETGEI
VWDKGRDFATVRKVLSMPQVNIVKKTEVQTGGFSKESILPKRNSDKLIARKKDWDP
KKYGGFDSPTVAYSVLVVAKVEKGKSKKLKSVKELLGITIMERSSFEKNPIDFLEAK
GYKEVKKDLIIKLPKYSLFELENGRKRMLASAGELQKGNELALPSKYVNFLYLASHY
EKLKGSPEDNEQKQLFVEQHKHYLDEIIEQISEFSKRVILADANLDKVLSAYNKHRDK
PIREQAENIIHLFTLTNLGAPAAFKYFDTTIDRKRYTSTKEVLDATLIHQSITGLYETRI
DLSQLGGDSGGSPKKKRKV
pNMG-620 amino acid sequence: ecTadA_{(wild-type)}-(SGGS)₂₋XTEN-(SGGS)₂-
ecTadA_{(W23R}_H36L_P48A_R51L_L84F_A106V_D108N_H123Y_S146C_D147Y_R152P_E155V_I156F_K157N)-(SGGS)₂-
XTEN-(SGGS)₂_nCas9_GGS_NLS
(SEQ ID NO: 168)
MSEVEFSHEYWMRHALTLAKRAWDEREVPVGAVLVHNNRVIGEGWNRPIGRH
DPTAHAEIMALRQGGLVMQNYRLIDATLYVTLEPCVMCAGAMIHSRIGRVVFG
ARDAKTGAAGSLMDVLHHPGMNHRVEITEGILADECAALLSDFFRMRRQEIKA
QKKAQSSTDSGGSSGGSSGSETPGTSESATPESSGGSSGGSSEVEFSHEYWMRHALT
LAKRARDEREVPVGAVLVLNNRVIGEGWNRAIGLHDPTAHAEIMALRQGGLV
MQNYRLIDATLYVTFEPCVMCAGAMIHSRIGRVVFGVRNAKTGAAGSLMDVLH
YPGMNHRVEITEGILADECAALLCYFFRMPRQVFNAQKKAQSSTDSGGSSGGSS
GSETPGTSESATPESSGGSSGGSDKKYSIGLAIGTNSVGWAVITDEYKVPSKKFKVLGN
TDRHSIKKNLIGALLFDSGETAEATRLKRTARRRYTRRKNRICYLQEIFSNEMAKVDD
SFFHRLEESFLVEEDKKHERHPIFGNIVDEVAYHEKYPTIYHLRKKLVDSTDKADLRL
IYLALAHMIKFRGHFLIEGDLNPDNSDVDKLFIQLVQTYNQLFEENPINASGVDAKAI
LSARLSKSRRLENLIAQLPGEKKNGLFGNLIALSLGLTPNFKSNFDLAEDAKLQLSKD
TYDDDLDNLLAQIGDQYADLFLAAKNLSDAILLSDILRVNTEITKAPLSASMIKRYDE
HHQDLTLLKALVRQQLPEKYKEIFFDQSKNGYAGYIDGGASQEEFYKFIKPILEKMD
GTEELLVKLNREDLLRKQRTFDNGSIPHQIHLGELHAILRRQEDFYPFLKDNREKIEKI
LTFRIPYYVGPLARGNSRFAWMTRKSEETITPWNFEEVVDKGASAQSFIERMTNFDK
NLPNEKVLPKHSLLYEYFTVYNELTKVKYVTEGMRKPAFLSGEQKKAIVDLLFKTNR
KVTVKQLKEDYFKKIECFDSVEISGVEDRFNASLGTYHDLLKIIKDKDFLDNEENEDI
LEDIVLTLTLFEDREMIEERLKTYAHLFDDKVMKQLKRRRYTGWGRLSRKLINGIRD
KQSGKTILDFLKSDGFANRNFMQLIHDDSLTFKEDIQKAQVSGQGDSLHEHIANLAG
SPAIKKGILQTVKVVDELVKVMGRHKPENIVIEMARENQTTQKGQKNSRERMKRIEE
GIKELGSQILKEHPVENTQLQNEKLYLYYLQNGRDMYVDQELDINRLSDYDVDHIVP
QSFLKDDSIDNKVLTRSDKNRGKSDNVPSEEVVKKMKNYWRQLLNAKLITQRKFDN
LTKAERGGLSELDKAGFIKRQLVETRQITKHVAQILDSRMNTKYDENDKLIREVKVIT
LKSKLVSDFRKDFQFYKVREINNYHHAHDAYLNAVVGTALIKKYPKLESEFVYGDY
KVYDVRKMIAKSEQEIGKATAKYFFYSNIMNFFKTEITLANGEIRKRPLIETNGETGEI
VWDKGRDFATVRKVLSMPQVNIVKKTEVQTGGFSKESILPKRNSDKLIARKKDWDP
KKYGGFDSPTVAYSVLVVAKVEKGKSKKLKSVKELLGITIMERSSFEKNPIDFLEAK
GYKEVKKDLIIKLPKYSLFELENGRKRMLASAGELQKGNELALPSKYVNFLYLASHY
EKLKGSPEDNEQKQLFVEQHKHYLDEIIEQISEFSKRVILADANLDKVLSAYNKHRDK
PIREQAENIIHLFTLTNLGAPAAFKYFDTTIDRKRYTSTKEVLDATLIHQSITGLYETRI
DLSQLGGDSGGSPKKKRKV
pNMG-617 amino acid sequence: ecTadA_{(wild-type)}-(SGGS)₂-XTEN-(SGGS)₂-
ecTadA_{(W23L}_H36L_P48A_R51L_L84F_A106V_D108N_H123Y_A142A_S146C_D147Y_E155V_I156F_K157N)-(SGGS)₂-
XTEN-(SGGS)₂_nCas9_GGS_NLS
(SEQ ID NO: 169)
MSEVEFSHEYWMRHALTLAKRAWDEREVPVGAVLVHNNRVIGEGWNRPIGRH
DPTAHAEIMALRQGGLVMQNYRLIDATLYVTLEPCVMCAGAMIHSRIGRVVFG
ARDAKTGAAGSLMDVLHHPGMNHRVEITEGILADECAALLSDFFRMRRQEIKA
QKKAQSSTDSGGSSGGSSGSETPGTSESATPESSGGSSGGSSEVEFSHEYWMRHALT
LAKRALDEREVPVGAVLVLNNRVIGEGWNRAIGLHDPTAHAEIMALRQGGLV
MQNYRLIDATLYVTFEPCVMCAGAMIHSRIGRVVFGVRNAKTGAAGSLMDVLH
YPGMNHRVEITEGILADECNALLCYFFRMRRQVFNAQKKAQSSTDSGGSSGGSS
GSETPGTSESATPESSGGSSGGSDKKYSIGLAIGTNSVGWAVITDEYKVPSKKFKVLGN
TDRHSIKKNLIGALLFDSGETAEATRLKRTARRRYTRRKNRICYLQEIFSNEMAKVDD
SFFHRLEESFLVEEDKKHERHPIFGNIVDEVAYHEKYPTIYHLRKKLVDSTDKADLRL
IYLALAHMIKFRGHFLIEGDLNPDNSDVDKLFIQLVQTYNQLFEENPINASGVDAKAI
LSARLSKSRRLENLIAQLPGEKKNGLFGNLIALSLGLTPNFKSNFDLAEDAKLQLSKD
TYDDDLDNLLAQIGDQYADLFLAAKNLSDAILLSDILRVNTEITKAPLSASMIKRYDE
HHQDLTLLKALVRQQLPEKYKEIFFDQSKNGYAGYIDGGASQEEFYKFIKPILEKMD
GTEELLVKLNREDLLRKQRTFDNGSIPHQIHLGELHAILRRQEDFYPFLKDNREKIEKI
LTFRIPYYVGPLARGNSRFAWMTRKSEETITPWNFEEVVDKGASAQSFIERMTNFDK
NLPNEKVLPKHSLLYEYFTVYNELTKVKYVTEGMRKPAFLSGEQKKAIVDLLFKTNR
KVTVKQLKEDYFKKIECFDSVEISGVEDRFNASLGTYHDLLKIIKDKDFLDNEENEDI
LEDIVLTLTLFEDREMIEERLKTYAHLFDDKVMKQLKRRRYTGWGRLSRKLINGIRD
KQSGKTILDFLKSDGFANRNFMQLIHDDSLTFKEDIQKAQVSGQGDSLHEHIANLAG
SPAIKKGILQTVKVVDELVKVMGRHKPENIVIEMARENQTTQKGQKNSRERMKRIEE
GIKELGSQILKEHPVENTQLQNEKLYLYYLQNGRDMYVDQELDINRLSDYDVDHIVP
QSFLKDDSIDNKVLTRSDKNRGKSDNVPSEEVVKKMKNYWRQLLNAKLITQRKFDN
LTKAERGGLSELDKAGFIKRQLVETRQITKHVAQILDSRMNTKYDENDKLIREVKVIT
LKSKLVSDFRKDFQFYKVREINNYHHAHDAYLNAVVGTALIKKYPKLESEFVYGDY
KVYDVRKMIAKSEQEIGKATAKYFFYSNIMNFFKTEITLANGEIRKRPLIETNGETGEI
VWDKGRDFATVRKVLSMPQVNIVKKTEVQTGGFSKESILPKRNSDKLIARKKDWDP
KKYGGFDSPTVAYSVLVVAKVEKGKSKKLKSVKELLGITIMERSSFEKNPIDFLEAK
GYKEVKKDLIIKLPKYSLFELENGRKRMLASAGELQKGNELALPSKYVNFLYLASHY
EKLKGSPEDNEQKQLFVEQHKHYLDEIIEQISEFSKRVILADANLDKVLSAYNKHRDK
PIREQAENIIHLFTLTNLGAPAAFKYFDTTIDRKRYTSTKEVLDATLIHQSITGLYETRI
DLSQLGGDSGGSPKKKRKV
pNMG-618 amino acid sequence: ecTadA_{(wild-type)}-(SGGS)₂-XTEN-(SGGS)₂-
ecTadA_{(W23L}_H36L_P48A_R51L_L84F_A106V_D108N_H123Y_A142A_S146C_D147Y_R152P_E155V_I156F_K157N)-
(SGGS)₂-XTEN-(SGGS)₂_nCas9_GGS_NLS
(SEQ ID NO: 170)
MSEVEFSHEYWMRHALTLAKRAWDEREVPVGAVLVHNNRVIGEGWNRPIGRH
DPTAHAEIMALRQGGLVMQNYRLIDATLYVTLEPCVMCAGAMIHSRIGRVVFG
ARDAKTGAAGSLMDVLHHPGMNHRVEITEGILADECAALLSDFFRMRRQEIKA
QKKAQSSTDSGGSSGGSSGSETPGTSESATPESSGGSSGGSSEVEFSHEYWMRHALT
LAKRALDEREVPVGAVLVLNNRVIGEGWNRAIGLHDPTAHAEIMALRQGGLV
MQNYRLIDATLYVTFEPCVMCAGAMIHSRIGRVVFGVRNAKTGAAGSLMDVLH
YPGMNHRVEITEGILADECNALLCYFFRMPRQVFNAQKKAQSSTDSGGSSGGSS
GSETPGTSESATPESSGGSSGGSDKKYSIGLAIGTNSVGWAVITDEYKVPSKKFKVLGN
TDRHSIKKNLIGALLFDSGETAEATRLKRTARRRYTRRKNRICYLQEIFSNEMAKVDD
SFFHRLEESFLVEEDKKHERHPIFGNIVDEVAYHEKYPTIYHLRKKLVDSTDKADLRL
IYLALAHMIKFRGHFLIEGDLNPDNSDVDKLFIQLVQTYNQLFEENPINASGVDAKAI
LSARLSKSRRLENLIAQLPGEKKNGLFGNLIALSLGLTPNFKSNFDLAEDAKLQLSKD
TYDDDLDNLLAQIGDQYADLFLAAKNLSDAILLSDILRVNTEITKAPLSASMIKRYDE
HHQDLTLLKALVRQQLPEKYKEIFFDQSKNGYAGYIDGGASQEEFYKFIKPILEKMD
GTEELLVKLNREDLLRKQRTFDNGSIPHQIHLGELHAILRRQEDFYPFLKDNREKIEKI
LTFRIPYYVGPLARGNSRFAWMTRKSEETITPWNFEEVVDKGASAQSFIERMTNFDK
NLPNEKVLPKHSLLYEYFTVYNELTKVKYVTEGMRKPAFLSGEQKKAIVDLLFKTNR
KVTVKQLKEDYFKKIECFDSVEISGVEDRFNASLGTYHDLLKIIKDKDFLDNEENEDI
LEDIVLTLTLFEDREMIEERLKTYAHLFDDKVMKQLKRRRYTGWGRLSRKLINGIRD
KQSGKTILDFLKSDGFANRNFMQLIHDDSLTFKEDIQKAQVSGQGDSLHEHIANLAG
SPAIKKGILQTVKVVDELVKVMGRHKPENIVIEMARENQTTQKGQKNSRERMKRIEE
GIKELGSQILKEHPVENTQLQNEKLYLYYLQNGRDMYVDQELDINRLSDYDVDHIVP
QSFLKDDSIDNKVLTRSDKNRGKSDNVPSEEVVKKMKNYWRQLLNAKLITQRKFDN
LTKAERGGLSELDKAGFIKRQLVETRQITKHVAQILDSRMNTKYDENDKLIREVKVIT
LKSKLVSDFRKDFQFYKVREINNYHHAHDAYLNAVVGTALIKKYPKLESEFVYGDY
KVYDVRKMIAKSEQEIGKATAKYFFYSNIMNFFKTEITLANGEIRKRPLIETNGETGEI
VWDKGRDFATVRKVLSMPQVNIVKKTEVQTGGFSKESILPKRNSDKLIARKKDWDP
KKYGGFDSPTVAYSVLVVAKVEKGKSKKLKSVKELLGITIMERSSFEKNPIDFLEAK
GYKEVKKDLIIKLPKYSLFELENGRKRMLASAGELQKGNELALPSKYVNFLYLASHY
EKLKGSPEDNEQKQLFVEQHKHYLDEIIEQISEFSKRVILADANLDKVLSAYNKHRDK
PIREQAENIIHLFTLTNLGAPAAFKYFDTTIDRKRYTSTKEVLDATLIHQSITGLYETRI
DLSQLGGDSGGSPKKKRKV
pNMG-620 amino acid sequence: ecTadA_{(wild-type)}-(SGGS)₂-XTEN-(SGGS)₂-
ecTadA_{(W23R}_H36L_P48A_R51L_L84F_A106V_D108N_H123Y_S146C_D147Y_R152P_E155V_I156F_K157N)-(SGGS)₂-
XTEN-(SGGS)₂_nCas9_GGS_NLS
(SEQ ID NO: 171)
MSEVEFSHEYWMRHALTLAKRAWDEREVPVGAVLVHNNRVIGEGWNRPIGRH
DPTAHAEIMALRQGGLVMQNYRLIDATLYVTLEPCVMCAGAMIHSRIGRVVFG
ARDAKTGAAGSLMDVLHHPGMNHRVEITEGILADECAALLSDFFRMRRQEIKA
QKKAQSSTDSGGSSGGSSGSETPGTSESATPESSGGSSGGSSEVEFSHEYWMRHALT
LAKRARDEREVPVGAVLVLNNRVIGEGWNRAIGLHDPTAHAEIMALRQGGLV
MQNYRLIDATLYVTFEPCVMCAGAMIHSRIGRVVFGVRNAKTGAAGSLMDVLH
YPGMNHRVEITEGILADECAALLCYFFRMPRQVFNAQKKAQSSTDSGGSSGGSS
GSETPGTSESATPESSGGSSGGSDKKYSIGLAIGTNSVGWAVITDEYKVPSKKFKVLGN
TDRHSIKKNLIGALLFDSGETAEATRLKRTARRRYTRRKNRICYLQEIFSNEMAKVDD
SFFHRLEESFLVEEDKKHERHPIFGNIVDEVAYHEKYPTIYHLRKKLVDSTDKADLRL
IYLALAHMIKFRGHFLIEGDLNPDNSDVDKLFIQLVQTYNQLFEENPINASGVDAKAI
LSARLSKSRRLENLIAQLPGEKKNGLFGNLIALSLGLTPNFKSNFDLAEDAKLQLSKD
TYDDDLDNLLAQIGDQYADLFLAAKNLSDAILLSDILRVNTEITKAPLSASMIKRYDE
HHQDLTLLKALVRQQLPEKYKEIFFDQSKNGYAGYIDGGASQEEFYKFIKPILEKMD
GTEELLVKLNREDLLRKQRTFDNGSIPHQIHLGELHAILRRQEDFYPFLKDNREKIEKI
LTFRIPYYVGPLARGNSRFAWMTRKSEETITPWNFEEVVDKGASAQSFIERMTNFDK
NLPNEKVLPKHSLLYEYFTVYNELTKVKYVTEGMRKPAFLSGEQKKAIVDLLFKTNR
KVTVKQLKEDYFKKIECFDSVEISGVEDRFNASLGTYHDLLKIIKDKDFLDNEENEDI
LEDIVLTLTLFEDREMIEERLKTYAHLFDDKVMKQLKRRRYTGWGRLSRKLINGIRD
KQSGKTILDFLKSDGFANRNFMQLIHDDSLTFKEDIQKAQVSGQGDSLHEHIANLAG
SPAIKKGILQTVKVVDELVKVMGRHKPENIVIEMARENQTTQKGQKNSRERMKRIEE
GIKELGSQILKEHPVENTQLQNEKLYLYYLQNGRDMYVDQELDINRLSDYDVDHIVP
QSFLKDDSIDNKVLTRSDKNRGKSDNVPSEEVVKKMKNYWRQLLNAKLITQRKFDN
LTKAERGGLSELDKAGFIKRQLVETRQITKHVAQILDSRMNTKYDENDKLIREVKVIT
LKSKLVSDFRKDFQFYKVREINNYHHAHDAYLNAVVGTALIKKYPKLESEFVYGDY
KVYDVRKMIAKSEQEIGKATAKYFFYSNIMNFFKTEITLANGEIRKRPLIETNGETGEI
VWDKGRDFATVRKVLSMPQVNIVKKTEVQTGGFSKESILPKRNSDKLIARKKDWDP
KKYGGFDSPTVAYSVLVVAKVEKGKSKKLKSVKELLGITIMERSSFEKNPIDFLEAK
GYKEVKKDLIIKLPKYSLFELENGRKRMLASAGELQKGNELALPSKYVNFLYLASHY
EKLKGSPEDNEQKQLFVEQHKHYLDEIIEQISEFSKRVILADANLDKVLSAYNKHRDK
PIREQAENIIHLFTLTNLGAPAAFKYFDTTIDRKRYTSTKEVLDATLIHQSITGLYETRI
DLSQLGGDSGGSPKKKRKV
pNMG-621 amino acid sequence: ecTadA_{(wild-type)}- 32 a.a. linker-
ecTadA_{(H36L}_P48A_R51L_L84F_A106V_D108N_H123Y_S146C_D147Y_R152P_E155V_I156F K157N)- 24 a.a.
linker_nCas9_GGS_NLS
(SEQ ID NO: 172)
MSEVEFSHEYWMRHALTLAKRAWDEREVPVGAVLVHNNRVIGEGWNRPIGRH
DPTAHAEIMALRQGGLVMQNYRLIDATLYVTLEPCVMCAGAMIHSRIGRVVFG
ARDAKTGAAGSLMDVLHHPGMNHRVEITEGILADECAALLSDFFRMRRQEIKA
QKKAQSSTDSGGSSGGSSGSETPGTSESATPESSGGSSGGSSEVEFSHEXWMRHALTL
AKRAWDEREVPVGAVLVLNNRVIGEGWNRAIGLHDPTAHAEIMALRQGGLVM
QNYRLIDATLYVTFEPCVMCAGAMIHSRIGRVVFGVRNAKTGAAGSLMDVLHY
PGMNHRVEITEGILADECAALLCYFFRMPRQVFNAQKKAQSSTDSGGSSGGSSGS
ETPGTSESATPESDKKYSIGLAIGTNSVGWAVITDEYKVPSKKFKVLGNTDRHSIKKNL
IGALLFDSGETAEATRLKRTARRRYTRRKNRICYLQEIFSNEMAKVDDSFFHRLEESF
LVEEDKKHERHPIFGNIVDEVAYHEKYPTIYHLRKKLVDSTDKADLRLIYLALAHMI
KFRGHFLIEGDLNPDNSDVDKLFIQLVQTYNQLFEENPINASGVDAKAILSARLSKSR
RLENLIAQLPGEKKNGLFGNLIALSLGLTPNFKSNFDLAEDAKLQLSKDTYDDDLDN
LLAQIGDQYADLFLAAKNLSDAILLSDILRVNTEITKAPLSASMIKRYDEHHQDLTLL
KALVRQQLPEKYKEIFFDQSKNGYAGYIDGGASQEEFYKFIKPILEKMDGTEELLVKL
NREDLLRKQRTFDNGSIPHQIHLGELHAILRRQEDFYPFLKDNREKIEKILTFRIPYYV
GPLARGNSRFAWMTRKSEETITPWNFEEVVDKGASAQSFIERMTNFDKNLPNEKVLP
KHSLLYEYFTVYNELTKVKYVTEGMRKPAFLSGEQKKAIVDLLFKTNRKVTVKQLK
EDYFKKIECFDSVEISGVEDRFNASLGTYHDLLKIIKDKDFLDNEENEDILEDIVLTLTL
FEDREMIEERLKTYAHLFDDKVMKQLKRRRYTGWGRLSRKLINGIRDKQSGKTILDF
LKSDGFANRNFMQLIHDDSLTFKEDIQKAQVSGQGDSLHEHIANLAGSPAIKKGILQT
VKVVDELVKVMGRHKPENIVIEMARENQTTQKGQKNSRERMKRIEEGIKELGSQILK
EHPVENTQLQNEKLYLYYLQNGRDMYVDQELDINRLSDYDVDHIVPQSFLKDDSID
NKVLTRSDKNRGKSDNVPSEEVVKKMKNYWRQLLNAKLITQRKFDNLTKAERGGL
SELDKAGFIKRQLVETRQITKHVAQILDSRMNTKYDENDKLIREVKVITLKSKLVSDF
RKDFQFYKVREINNYHHAHDAYLNAVVGTALIKKYPKLESEFVYGDYKVYDVRKM
IAKSEQEIGKATAKYFFYSNIMNFFKTEITLANGEIRKRPLIETNGETGEIVWDKGRDF
ATVRKVLSMPQVNIVKKTEVQTGGFSKESILPKRNSDKLIARKKDWDPKKYGGFDSP
TVAYSVLVVAKVEKGKSKKLKSVKELLGITIMERSSFEKNPIDFLEAKGYKEVKKDLI
IKLPKYSLFELENGRKRMLASAGELQKGNELALPSKYVNFLYLASHYEKLKGSPEDN
EQKQLFVEQHKHYLDEIIEQISEFSKRVILADANLDKVLSAYNKHRDKPIREQAENIIH
LFTLTNLGAPAAFKYFDTTIDRKRYTSTKEVLDATLIHQSITGLYETRIDLSQLGGDSG
GSPKKKRKV
pNMG-622 amino acid sequence: ecTadA_{(wild-type)}- 32 a.a. linker-
ecTadA_{(H36L}_P48A_R51L_L84F_A106V_D108N_H123Y_A142N_S146C_D147Y_R152P_E155V_I156F_K157N)- 24 a.a.
linker_nCas9_GGS_NLS
(SEQ ID NO: 173)
MSEVEFSHEYWMRHALTLAKRAWDEREVPVGAVLVHNNRVIGEGWNRPIGRH
DPTAHAEIMALRQGGLVMQNYRLIDATLYVTLEPCVMCAGAMIHSRIGRVVFG
ARDAKTGAAGSLMDVLHHPGMNHRVEITEGILADECAALLSDFFRMRRQEIKA
QKKAQSSTDSGGSSGGSSGSETPGTSESATPESSGGSSGGSSEVEFSHEYWMRHALTL
AKRAWDEREVPVGAVLVLNNRVIGEGWNRAIGLHDPTAHAEIMALRQGGLVM
QNYRLIDATLYVTFEPCVMCAGAMIHSRIGRVVFGVRNAKTGAAGSLMDVLHY
PGMNHRVEITEGILADECNALLCYFFRMPRQVFNAQKKAQSSTDSGGSSGGSSGS
ETPGTSESATPESDKKYSIGLAIGTNSVGWAVITDEYKVPSKKFKVLGNTDRHSIKKNL
IGALLFDSGETAEATRLKRTARRRYTRRKNRICYLQEIFSNEMAKVDDSFFHRLEESF
LVEEDKKHERHPIFGNIVDEVAYHEKYPTIYHLRKKLVDSTDKADLRLIYLALAHMI
KFRGHFLIEGDLNPDNSDVDKLFIQLVQTYNQLFEENPINASGVDAKAILSARLSKSR
RLENLIAQLPGEKKNGLFGNLIALSLGLTPNFKSNFDLAEDAKLQLSKDTYDDDLDN
LLAQIGDQYADLFLAAKNLSDAILLSDILRVNTEITKAPLSASMIKRYDEHHQDLTLL
KALVRQQLPEKYKEIFFDQSKNGYAGYIDGGASQEEFYKFIKPILEKMDGTEELLVKL
NREDLLRKQRTFDNGSIPHQIHLGELHAILRRQEDFYPFLKDNREKIEKILTFRIPYYV
GPLARGNSRFAWMTRKSEETITPWNFEEVVDKGASAQSFIERMTNFDKNLPNEKVLP
KHSLLYEYFTVYNELTKVKYVTEGMRKPAFLSGEQKKAIVDLLFKTNRKVTVKQLK
EDYFKKIECFDSVEISGVEDRFNASLGTYHDLLKIIKDKDFLDNEENEDILEDIVLTLTL
FEDREMIEERLKTYAHLFDDKVMKQLKRRRYTGWGRLSRKLINGIRDKQSGKTILDF
LKSDGFANRNFMQLIHDDSLTFKEDIQKAQVSGQGDSLHEHIANLAGSPAIKKGILQT
VKVVDELVKVMGRHKPENIVIEMARENQTTQKGQKNSRERMKRIEEGIKELGSQILK
EHPVENTQLQNEKLYLYYLQNGRDMYVDQELDINRLSDYDVDHIVPQSFLKDDSID
NKVLTRSDKNRGKSDNVPSEEVVKKMKNYWRQLLNAKLITQRKFDNLTKAERGGL
SELDKAGFIKRQLVETRQITKHVAQILDSRMNTKYDENDKLIREVKVITLKSKLVSDF
RKDFQFYKVREINNYHHAHDAYLNAVVGTALIKKYPKLESEFVYGDYKVYDVRKM
IAKSEQEIGKATAKYFFYSNIMNFFKTEITLANGEIRKRPLIETNGETGEIVWDKGRDF
ATVRKVLSMPQVNIVKKTEVQTGGFSKESILPKRNSDKLIARKKDWDPKKYGGFDSP
TVAYSVLVVAKVEKGKSKKLKSVKELLGITIMERSSFEKNPIDFLEAKGYKEVKKDLI
IKLPKYSLFELENGRKRMLASAGELQKGNELALPSKYVNFLYLASHYEKLKGSPEDN
EQKQLFVEQHKHYLDEIIEQISEFSKRVILADANLDKVLSAYNKHRDKPIREQAENIIH
LFTLTNLGAPAAFKYFDTTIDRKRYTSTKEVLDATLIHQSITGLYETRIDLSQLGGDSG
GSPKKKRKV
pNMG-623 amino acid sequence: ecTadA_{(wild-type)}- 32 a. a. linker-
ecTadA_{(W23L}_H36L_P48A_R51L_L84F_A106V_D108N_H123Y_S146C_D147Y_R152P_E155V_I156F_K157N)- 24 a.a.
linker_nCas9_GGS_NLS
(SEQ ID NO: 174)
MSEVEFSHEYWMRHALTLAKRAWDEREVPVGAVLVHNNRVIGEGWNRPIGRH
DPTAHAEIMALRQGGLVMQNYRLIDATLYVTLEPCVMCAGAMIHSRIGRVVFG
ARDAKTGAAGSLMDVLHHPGMNHRVEITEGILADECAALLSDFFRMRRQEIKA
QKKAQSSTDSGGSSGGSSGSETPGTSESATPESSGGSSGGSSEVEFSHEYWMRHALTL
AKRALDEREVPVGAVLVLNNRVIGEGWNRAIGLHDPTAHAEIMALRQGGLVM
QNYRLIDATLYVTFEPCVMCAGAMIHSRIGRVVFGVRNAKTGAAGSLMDVLHY
PGMNHRVEITEGILADECAALLCYFFRMPRQVFNAQKKAQSSTDSGGSSGGSSGS
ETPGTSESATPESDKKYSIGLAIGTNSVGWAVITDEYKVPSKKFKVLGNTDRHSIKKNL
IGALLFDSGETAEATRLKRTARRRYTRRKNRICYLQEIFSNEMAKVDDSFFHRLEESF
LVEEDKKHERHPIFGNIVDEVAYHEKYPTIYHLRKKLVDSTDKADLRLIYLALAHMI
KFRGHFLIEGDLNPDNSDVDKLFIQLVQTYNQLFEENPINASGVDAKAILSARLSKSR
RLENLIAQLPGEKKNGLFGNLIALSLGLTPNFKSNFDLAEDAKLQLSKDTYDDDLDN
LLAQIGDQYADLFLAAKNLSDAILLSDILRVNTEITKAPLSASMIKRYDEHHQDLTLL
KALVRQQLPEKYKEIFFDQSKNGYAGYIDGGASQEEFYKFIKPILEKMDGTEELLVKL
NREDLLRKQRTFDNGSIPHQIHLGELHAILRRQEDFYPFLKDNREKIEKILTFRIPYYV
GPLARGNSRFAWMTRKSEETITPWNFEEVVDKGASAQSFIERMTNFDKNLPNEKVLP
KHSLLYEYFTVYNELTKVKYVTEGMRKPAFLSGEQKKAIVDLLFKTNRKVTVKQLK
EDYFKKIECFDSVEISGVEDRFNASLGTYHDLLKIIKDKDFLDNEENEDILEDIVLTLTL
FEDREMIEERLKTYAHLFDDKVMKQLKRRRYTGWGRLSRKLINGIRDKQSGKTILDF
LKSDGFANRNFMQLIHDDSLTFKEDIQKAQVSGQGDSLHEHIANLAGSPAIKKGILQT
VKVVDELVKVMGRHKPENIVIEMARENQTTQKGQKNSRERMKRIEEGIKELGSQILK
EHPVENTQLQNEKLYLYYLQNGRDMYVDQELDINRLSDYDVDHIVPQSFLKDDSID
NKVLTRSDKNRGKSDNVPSEEVVKKMKNYWRQLLNAKLITQRKFDNLTKAERGGL
SELDKAGFIKRQLVETRQITKHVAQILDSRMNTKYDENDKLIREVKVITLKSKLVSDF
RKDFQFYKVREINNYHHAHDAYLNAVVGTALIKKYPKLESEFVYGDYKVYDVRKM
IAKSEQEIGKATAKYFFYSNIMNFFKTEITLANGEIRKRPLIETNGETGEIVWDKGRDF
ATVRKVLSMPQVNIVKKTEVQTGGFSKESILPKRNSDKLIARKKDWDPKKYGGFDSP
TVAYSVLVVAKVEKGKSKKLKSVKELLGITIMERSSFEKNPIDFLEAKGYKEVKKDLI
IKLPKYSLFELENGRKRMLASAGELQKGNELALPSKYVNFLYLASHYEKLKGSPEDN
EQKQLFVEQHKHYLDEIIEQISEFSKRVILADANLDKVLSAYNKHRDKPIREQAENIIH
LFTLTNLGAPAAFKYFDTTIDRKRYTSTKEVLDATLIHQSITGLYETRIDLSQLGGDSG
GSPKKKRKV
BE6.3: ecTadA_{(wild-type)}-(SGGS)₂-XTEN-(SGGS)₂-
ecTadA_{(H36L}_P48S_R51L_L84F_A106V_D108N_H123Y_S146C_D147Y_E155V_I156F_K157N)-(SGGS)₂-XTEN-
(SGGS)₂_nCas9 SGGS_NLS
(SEQ ID NO: 175)
MSEVEFSHEYWMRHALTLAKRAWDEREVPVGAVLVHNNRVIGEGWNRPIGRH
DPTAHAEIMALRQGGLVMQNYRLIDATLYVTLEPCVMCAGAMIHSRIGRVVFG
ARDAKTGAAGSLMDVLHHPGMNHRVEITEGILADECAALLSDFFRMRRQEIKA
QKKAQSSTDSGGSSGGSSGSETPGTSESATPESSGGSSGGSSEVEFSHEYWMRHALT
LAKRAWDEREVPVGAVLVLNNRVIGEGWNRSIGLHDPTAHAEIMALRQGGLV
MQNYRLIDATLYVTFEPCVMCAGAMIHSRIGRVVFGVRNAKTGAAGSLMDVLH
YPGMNHRVEITEGILADECAALLCYFFRMRRQVFNAQKKAQSSTDSGGSSGGSS
GSETPGTSESATPESSGGSSGGSDKKYSIGLAIGTNSVGWAVITDEYKVPSKKFKVLGN
TDRHSIKKNLIGALLFDSGETAEATRLKRTARRRYTRRKNRICYLQEIFSNEMAKVDD
SFFHRLEESFLVEEDKKHERHPIFGNIVDEVAYHEKYPTIYHLRKKLVDSTDKADLRL
IYLALAHMIKFRGHFLIEGDLNPDNSDVDKLFIQLVQTYNQLFEENPINASGVDAKAI
LSARLSKSRRLENLIAQLPGEKKNGLFGNLIALSLGLTPNFKSNFDLAEDAKLQLSKD
TYDDDLDNLLAQIGDQYADLFLAAKNLSDAILLSDILRVNTEITKAPLSASMIKRYDE
HHQDLTLLKALVRQQLPEKYKEIFFDQSKNGYAGYIDGGASQEEFYKFIKPILEKMD
GTEELLVKLNREDLLRKQRTFDNGSIPHQIHLGELHAILRRQEDFYPFLKDNREKIEKI
LTFRIPYYVGPLARGNSRFAWMTRKSEETITPWNFEEVVDKGASAQSFIERMTNFDK
NLPNEKVLPKHSLLYEYFTVYNELTKVKYVTEGMRKPAFLSGEQKKAIVDLLFKTNR
KVTVKQLKEDYFKKIECFDSVEISGVEDRFNASLGTYHDLLKIIKDKDFLDNEENEDI
LEDIVLTLTLFEDREMIEERLKTYAHLFDDKVMKQLKRRRYTGWGRLSRKLINGIRD
KQSGKTILDFLKSDGFANRNFMQLIHDDSLTFKEDIQKAQVSGQGDSLHEHIANLAG
SPAIKKGILQTVKVVDELVKVMGRHKPENIVIEMARENQTTQKGQKNSRERMKRIEE
GIKELGSQILKEHPVENTQLQNEKLYLYYLQNGRDMYVDQELDINRLSDYDVDHIVP
QSFLKDDSIDNKVLTRSDKNRGKSDNVPSEEVVKKMKNYWRQLLNAKLITQRKFDN
LTKAERGGLSELDKAGFIKRQLVETRQITKHVAQILDSRMNTKYDENDKLIREVKVIT
LKSKLVSDFRKDFQFYKVREINNYHHAHDAYLNAVVGTALIKKYPKLESEFVYGDY
KVYDVRKMIAKSEQEIGKATAKYFFYSNIMNFFKTEITLANGEIRKRPLIETNGETGEI
VWDKGRDFATVRKVLSMPQVNIVKKTEVQTGGFSKESILPKRNSDKLIARKKDWDP
KKYGGFDSPTVAYSVLVVAKVEKGKSKKLKSVKELLGITIMERSSFEKNPIDFLEAK
GYKEVKKDLIIKLPKYSLFELENGRKRMLASAGELQKGNELALPSKYVNFLYLASHY
EKLKGSPEDNEQKQLFVEQHKHYLDEIIEQISEFSKRVILADANLDKVLSAYNKHRDK
PIREQAENIIHLFTLTNLGAPAAFKYFDTTIDRKRYTSTKEVLDATLIHQSITGLYET
RIDLSQLGGDSGGSPKKKRKV
ABE6.4: ecTadA_{(wild-type)}-(SGGS)₂-XTEN-(SGGS)₂-
ecTadA_{(H36L}_P48S_R51L_L84F_A106V_D108N_H123Y_A142N_S146C_D147Y_E155V_I156F_K157N)-(SGGS)₂-XTEN-
(SGGS)₂_nCas9 SGGS_NLS
(SEQ ID NO: 176)
MSEVEFSHEYWMRHALTLAKRAWDEREVPVGAVLVHNNRVIGEGWNRPIGRH
DPTAHAEIMALRQGGLVMQNYRLIDATLYVTLEPCVMCAGAMIHSRIGRVVFG
ARDAKTGAAGSLMDVLHHPGMNHRVEITEGILADECAALLSDFFRMRRQEIKA
QKKAQSSTDSGGSSGGSSGSETPGTSESATPESSGGSSGGSSEVEFSHEYWMRHALT
LAKRAWDEREVPVGAVLVLNNRVIGEGWNRSIGLHDPTAHAEIMALRQGGLV
MQNYRLIDATLYVTFEPCVMCAGAMIHSRIGRVVFGVRNAKTGAAGSLMDVLH
YPGMNHRVEITEGILADECNALLCYFFRMRRQVFNAQKKAQSSTDSGGSSGGSS
GSETPGTSESATPESSGGSSGGSDKKYSIGLAIGTNSVGWAVITDEYKVPSKKFKVLGN
TDRHSIKKNLIGALLFDSGETAEATRLKRTARRRYTRRKNRICYLQEIFSNEMAKVDD
SFFHRLEESFLVEEDKKHERHPIFGNIVDEVAYHEKYPTIYHLRKKLVDSTDKADLRL
IYLALAHMIKFRGHFLIEGDLNPDNSDVDKLFIQLVQTYNQLFEENPINASGVDAKAI
LSARLSKSRRLENLIAQLPGEKKNGLFGNLIALSLGLTPNFKSNFDLAEDAKLQLSKD
TYDDDLDNLLAQIGDQYADLFLAAKNLSDAILLSDILRVNTEITKAPLSASMIKRYDE
HHQDLTLLKALVRQQLPEKYKEIFFDQSKNGYAGYIDGGASQEEFYKFIKPILEKMD
GTEELLVKLNREDLLRKQRTFDNGSIPHQIHLGELHAILRRQEDFYPFLKDNREKIEKI
LTFRIPYYVGPLARGNSRFAWMTRKSEETITPWNFEEVVDKGASAQSFIERMTNFDK
NLPNEKVLPKHSLLYEYFTVYNELTKVKYVTEGMRKPAFLSGEQKKAIVDLLFKTNR
KVTVKQLKEDYFKKIECFDSVEISGVEDRFNASLGTYHDLLKIIKDKDFLDNEENEDI
LEDIVLTLTLFEDREMIEERLKTYAHLFDDKVMKQLKRRRYTGWGRLSRKLINGIRD
KQSGKTILDFLKSDGFANRNFMQLIHDDSLTFKEDIQKAQVSGQGDSLHEHIANLAG
SPAIKKGILQTVKVVDELVKVMGRHKPENIVIEMARENQTTQKGQKNSRERMKRIEE
GIKELGSQILKEHPVENTQLQNEKLYLYYLQNGRDMYVDQELDINRLSDYDVDHIVP
QSFLKDDSIDNKVLTRSDKNRGKSDNVPSEEVVKKMKNYWRQLLNAKLITQRKFDN
LTKAERGGLSELDKAGFIKRQLVETRQITKHVAQILDSRMNTKYDENDKLIREVKVIT
LKSKLVSDFRKDFQFYKVREINNYHHAHDAYLNAVVGTALIKKYPKLESEFVYGDY
KVYDVRKMIAKSEQEIGKATAKYFFYSNIMNFFKTEITLANGEIRKRPLIETNGETGEI
VWDKGRDFATVRKVLSMPQVNIVKKTEVQTGGFSKESILPKRNSDKLIARKKDWDP
KKYGGFDSPTVAYSVLVVAKVEKGKSKKLKSVKELLGITIMERSSFEKNPIDFLEAK
GYKEVKKDLIIKLPKYSLFELENGRKRMLASAGELQKGNELALPSKYVNFLYLASHY
EKLKGSPEDNEQKQLFVEQHKHYLDEIIEQISEFSKRVILADANLDKVLSAYNKHRDK
PIREQAENIIHLFTLTNLGAPAAFKYFDTTIDRKRYTSTKEVLDATLIHQSITGLYET
RIDLSQLGGDSGGSPKKKRKV
ABE7.8: ecTadA_{(wild-type)}-(SGGS)₂-XTEN-(SGGS)₂-
ecTadA_{(W23L}_H36L_P48AR51L_L84F_A106V_D108N_H123Y_A142N_S146C_D147Y_E155V_I156F_K157N)-(SGGS)₂-
XTEN-(SGGS)₂_nCas9 SGGS_NLS
(SEQ ID NO: 177)
MSEVEFSHEYWMRHALTLAKRAWDEREVPVGAVLVHNNRVIGEGWNRPIGRH
DPTAHAEIMALRQGGLVMQNYRLIDATLYVTLEPCVMCAGAMIHSRIGRVVFG
ARDAKTGAAGSLMDVLHHPGMNHRVEITEGILADECAALLSDFFRMRRQEIKA
QKKAQSSTDSGGSSGGSSGSETPGTSESATPESSGGSSGGSSEVEFSHEYWMRHALT
LAKRALDEREVPVGAVLVLNNRVIGEGWNRAIGLHDPTAHAEIMALRQGGLV
MQNYRLIDATLYVTFEPCVMCAGAMIHSRIGRVVFGVRNAKTGAAGSLMDVLH
YPGMNHRVEITEGILADECNALLCYFFRMRRQVFNAQKKAQSSTDSGGSSGGSS
GSETPGTSESATPESSGGSSGGSDKKYSIGLAIGTNSVGWAVITDEYKVPSKKFKVLGN
TDRHSIKKNLIGALLFDSGETAEATRLKRTARRRYTRRKNRICYLQEIFSNEMAKVDD
SFFHRLEESFLVEEDKKHERHPIFGNIVDEVAYHEKYPTIYHLRKKLVDSTDKADLRL
IYLALAHMIKFRGHFLIEGDLNPDNSDVDKLFIQLVQTYNQLFEENPINASGVDAKAI
LSARLSKSRRLENLIAQLPGEKKNGLFGNLIALSLGLTPNFKSNFDLAEDAKLQLSKD
TYDDDLDNLLAQIGDQYADLFLAAKNLSDAILLSDILRVNTEITKAPLSASMIKRYDE
HHQDLTLLKALVRQQLPEKYKEIFFDQSKNGYAGYIDGGASQEEFYKFIKPILEKMD
GTEELLVKLNREDLLRKQRTFDNGSIPHQIHLGELHAILRRQEDFYPFLKDNREKIEKI
LTFRIPYYVGPLARGNSRFAWMTRKSEETITPWNFEEVVDKGASAQSFIERMTNFDK
NLPNEKVLPKHSLLYEYFTVYNELTKVKYVTEGMRKPAFLSGEQKKAIVDLLFKTNR
KVTVKQLKEDYFKKIECFDSVEISGVEDRFNASLGTYHDLLKIIKDKDFLDNEENEDI
LEDIVLTLTLFEDREMIEERLKTYAHLFDDKVMKQLKRRRYTGWGRLSRKLINGIRD
KQSGKTILDFLKSDGFANRNFMQLIHDDSLTFKEDIQKAQVSGQGDSLHEHIANLAG
SPAIKKGILQTVKVVDELVKVMGRHKPENIVIEMARENQTTQKGQKNSRERMKRIEE
GIKELGSQILKEHPVENTQLQNEKLYLYYLQNGRDMYVDQELDINRLSDYDVDHIVP
QSFLKDDSIDNKVLTRSDKNRGKSDNVPSEEVVKKMKNYWRQLLNAKLITQRKFDN
LTKAERGGLSELDKAGFIKRQLVETRQITKHVAQILDSRMNTKYDENDKLIREVKVIT
LKSKLVSDFRKDFQFYKVREINNYHHAHDAYLNAVVGTALIKKYPKLESEFVYGDY
KVYDVRKMIAKSEQEIGKATAKYFFYSNIMNFFKTEITLANGEIRKRPLIETNGETGEI
VWDKGRDFATVRKVLSMPQVNIVKKTEVQTGGFSKESILPKRNSDKLIARKKDWDP
KKYGGFDSPTVAYSVLVVAKVEKGKSKKLKSVKELLGITIMERSSFEKNPIDFLEAK
GYKEVKKDLIIKLPKYSLFELENGRKRMLASAGELQKGNELALPSKYVNFLYLASHY
EKLKGSPEDNEQKQLFVEQHKHYLDEIIEQISEFSKRVILADANLDKVLSAYNKHRDK
PIREQAENIIHLFTLTNLGAPAAFKYFDTTIDRKRYTSTKEVLDATLIHQSITGLYET
RIDLSQLGGDSGGSPKKKRKV
ABE7.9: ecTadA_{(wild-type)}-(SGGS)₂-XTEN-(SGGS)₂-
ecTadA_{(W23L}_H36L_P48A_R51L_L84F_A106V_D108N_H123Y_A142N_S146C_D147Y_R152P_E155V_I156F_K157N)-
(SGGS)₂-XTEN-(SGGS)_nCas9 SGGS_NLS
(SEQ ID NO: 178)
MSEVEFSHEYWMRHALTLAKRAWDEREVPVGAVLVHNNRVIGEGWNRPIGRH
DPTAHAEIMALRQGGLVMQNYRLIDATLYVTLEPCVMCAGAMIHSRIGRVVFG
ARDAKTGAAGSLMDVLHHPGMNHRVEITEGILADECAALLSDFFRMRRQEIKA
QKKAQSSTDSGGSSGGSSGSETPGTSESATPESSGGSSGGSSEVEFSHEYWMRHALT
LAKRALDEREVPVGAVLVLNNRGEGWNRAIGLHDPTAHAEIMALRQGGLVMQ
NYRLIDATLYVTFEPCVMCAGAMIHSRIGRVVFGVRNAKTGAAGSLMDVLHYP
GMNHRVEITEGILADECNALLCYFFRMPRQVFNAQKKAQSSTDSGGSSGGSSGSE
TPGTSESATPESSGGSSGGSDKKYSIGLAIGTNSVGWAVITDEYKVPSKKFKVLGNTD
RHSIKKNLIGALLFDSGETAEATRLKRTARRRYTRRKNRICYLQEIFSNEMAKVDDSF
FHRLEESFLVEEDKKHERHPIFGNIVDEVAYHEKYPTIYHLRKKLVDSTDKADLRLIY
LALAHMIKFRGHFLIEGDLNPDNSDVDKLFIQLVQTYNQLFEENPINASGVDAKAILS
ARLSKSRRLENLIAQLPGEKKNGLFGNLIALSLGLTPNFKSNFDLAEDAKLQLSKDTY
DDDLDNLLAQIGDQYADLFLAAKNLSDAILLSDILRVNTEITKAPLSASMIKRYDEHH
QDLTLLKALVRQQLPEKYKEIFFDQSKNGYAGYIDGGASQEEFYKFIKPILEKMDGTE
ELLVKLNREDLLRKQRTFDNGSIPHQIHLGELHAILRRQEDFYPFLKDNREKIEKILTF
RIPYYVGPLARGNSRFAWMTRKSEETITPWNFEEVVDKGASAQSFIERMTNFDKNLP
NEKVLPKHSLLYEYFTVYNELTKVKYVTEGMRKPAFLSGEQKKAIVDLLFKTNRKV
TVKQLKEDYFKKIECFDSVEISGVEDRFNASLGTYHDLLKIIKDKDFLDNEENEDILED
IVLTLTLFEDREMIEERLKTYAHLFDDKVMKQLKRRRYTGWGRLSRKLINGIRDKQS
GKTILDFLKSDGFANRNFMQLIHDDSLTFKEDIQKAQVSGQGDSLHEHIANLAGSPAI
KKGILQTVKVVDELVKVMGRHKPENIVIEMARENQTTQKGQKNSRERMKRIEEGIK
ELGSQILKEHPVENTQLQNEKLYLYYLQNGRDMYVDQELDINRLSDYDVDHIVPQSF
LKDDSIDNKVLTRSDKNRGKSDNVPSEEVVKKMKNYWRQLLNAKLITQRKFDNLTK
AERGGLSELDKAGFIKRQLVETRQITKHVAQILDSRMNTKYDENDKLIREVKVITLKS
KLVSDFRKDFQFYKVREINNYHHAHDAYLNAVVGTALIKKYPKLESEFVYGDYKVY
DVRKMIAKSEQEIGKATAKYFFYSNIMNFFKTEITLANGEIRKRPLIETNGETGEIVWD
KGRDFATVRKVLSMPQVNIVKKTEVQTGGFSKESILPKRNSDKLIARKKDWDPKKY
GGFDSPTVAYSVLVVAKVEKGKSKKLKSVKELLGITIMERSSFEKNPIDFLEAKGYKE
VKKDLIIKLPKYSLFELENGRKRMLASAGELQKGNELALPSKYVNFLYLASHYEKLK
GSPEDNEQKQLFVEQHKHYLDEIIEQISEFSKRVILADANLDKVLSAYNKHRDKPIRE
QAENIIHLFTLTNLGAPAAFKYFDTTIDRKRYTSTKEVLDATLIHQSITGLYETRIDL
SQLGGDSGGSPKKKRKV
ABE7.10: ecTadA_{(wild-type)}-(SGGS)₂-XTEN-(SGGS)₂-
ecTadA_{(W23R}_H36L_P48AR51L_L84F_A106V_D108N_H123Y_S146C_D147Y_R152P_E155V_I156F_K157N)-(SGGS)₂-
XTEN-(SGGS)₂_nCas9 SGGS_NLS
(SEQ ID NO: 179)
MSEVEFSHEYWMRHALTLAKRAWDEREVPVGAVLVHNNRVIGEGWNRPIGRH
DPTAHAEIMALRQGGLVMQNYRLIDATLYVTLEPCVMCAGAMIHSRIGRVVFG
ARDAKTGAAGSLMDVLHHPGMNHRVEITEGILADECAALLSDFFRMRRQEIKA
QKKAQSSTDSGGSSGGSSGSETPGTSESATPESSGGSSGGSSEVEFSHEYWMRHALT
LAKRARDEREVPVGAVLVLNNRVIGEGWNRAIGLHDPTAHAEIMALRQGGLV
MQNYRLIDATLYVTFEPCVMCAGAMIHSRIGRVVFGVRNAKTGAAGSLMDVLH
YPGMNHRVEITEGILADECAALLCYFFRMPRQVFNAQKKAQSSTDSGGSSGGSS
GSETPGTSESATPESSGGSSGGSDKKYSIGLAIGTNSVGWAVITDEYKVPSKKFKVLGN
TDRHSIKKNLIGALLFDSGETAEATRLKRTARRRYTRRKNRICYLQEIFSNEMAKVDD
SFFHRLEESFLVEEDKKHERHPIFGNIVDEVAYHEKYPTIYHLRKKLVDSTDKADLRL
IYLALAHMIKFRGHFLIEGDLNPDNSDVDKLFIQLVQTYNQLFEENPINASGVDAKAI
LSARLSKSRRLENLIAQLPGEKKNGLFGNLIALSLGLTPNFKSNFDLAEDAKLQLSKD
TYDDDLDNLLAQIGDQYADLFLAAKNLSDAILLSDILRVNTEITKAPLSASMIKRYDE
HHQDLTLLKALVRQQLPEKYKEIFFDQSKNGYAGYIDGGASQEEFYKFIKPILEKMD
GTEELLVKLNREDLLRKQRTFDNGSIPHQIHLGELHAILRRQEDFYPFLKDNREKIEKI
LTFRIPYYVGPLARGNSRFAWMTRKSEETITPWNFEEVVDKGASAQSFIERMTNFDK
NLPNEKVLPKHSLLYEYFTVYNELTKVKYVTEGMRKPAFLSGEQKKAIVDLLFKTNR
KVTVKQLKEDYFKKIECFDSVEISGVEDRFNASLGTYHDLLKIIKDKDFLDNEENEDI
LEDIVLTLTLFEDREMIEERLKTYAHLFDDKVMKQLKRRRYTGWGRLSRKLINGIRD
KQSGKTILDFLKSDGFANRNFMQLIHDDSLTFKEDIQKAQVSGQGDSLHEHIANLAG
SPAIKKGILQTVKVVDELVKVMGRHKPENIVIEMARENQTTQKGQKNSRERMKRIEE
GIKELGSQILKEHPVENTQLQNEKLYLYYLQNGRDMYVDQELDINRLSDYDVDHIVP
QSFLKDDSIDNKVLTRSDKNRGKSDNVPSEEVVKKMKNYWRQLLNAKLITQRKFDN
LTKAERGGLSELDKAGFIKRQLVETRQITKHVAQILDSRMNTKYDENDKLIREVKVIT
LKSKLVSDFRKDFQFYKVREINNYHHAHDAYLNAVVGTALIKKYPKLESEFVYGDY
KVYDVRKMIAKSEQEIGKATAKYFFYSNIMNFFKTEITLANGEIRKRPLIETNGETGEI
VWDKGRDFATVRKVLSMPQVNIVKKTEVQTGGFSKESILPKRNSDKLIARKKDWDP
KKYGGFDSPTVAYSVLVVAKVEKGKSKKLKSVKELLGITIMERSSFEKNPIDFLEAK
GYKEVKKDLIIKLPKYSLFELENGRKRMLASAGELQKGNELALPSKYVNFLYLASHY
EKLKGSPEDNEQKQLFVEQHKHYLDEIIEQISEFSKRVILADANLDKVLSAYNKHRDK
PIREQAENIIHLFTLTNLGAPAAFKYFDTTIDRKRYTSTKEVLDATLIHQSITGLYET
RIDLSQLGGDSGGSPKKKRKV
ABEmax (7.10): NLS_ecTadA_{(wild-type)}-(SGGS)₂-XTEN-(SGGS)₂-
ecTadA7.10_{(W23R}_H36L_P48A_R51L_L84F_A106V_D108N_H123Y_S146C_D147Y_R152P_E155V_I156F_K157N)-
(SGGS)₂-XTEN-(SGGS)₂_nCas9 VRQR SGGS_NLS
(SEQ ID NO: 180)
MKRTADGSEFESPKKKRKVSEVEFSHEYWMRHALTLAKRAWDEREVPVGAVLVH
NNRVIGEGWNRPIGRHDPTAHAEIMALRQGGLVMQNYRLIDATLYVTLEPCVM
CAGAMIHSRIGRVVFGARDAKTGAAGSLMDVLHHPGMNHRVEITEGILADECA
ALLSDFFRMRRQEIKAQKKAQSSTDSGGSSGGSSGSETPGTSESATPESSGGSSGGSS
EVEFSHEYWMRHALTLAKRARDEREVPVGAVLVLNNRVIGEGWNRAIGLHDP
TAHAEIMALRQGGLVMQNYRLIDATLYVTFEPCVMCAGAMIHSRIGRVVFGVR
NAKTGAAGSLMDVLHYPGMNHRVEITEGILADECAALLCYFFRMPRQVFNAQK
KAQSSTDSGGSSGGSSGSETPGTSESATPESSGGSSGGSDKKYSIGLAIGTNSVGWAV
ITDEYKVPSKKFKVLGNTDRHSIKKNLIGALLFDSGETAEATRLKRTARRRYTRRKN
RICYLQEIFSNEMAKVDDSFFHRLEESFLVEEDKKHERHPIFGNIVDEVAYHEKYPTIY
HLRKKLVDSTDKADLRLIYLALAHMIKFRGHFLIEGDLNPDNSDVDKLFIQLVQTYN
QLFEENPINASGVDAKAILSARLSKSRRLENLIAQLPGEKKNGLFGNLIALSLGLTPNF
KSNFDLAEDAKLQLSKDTYDDDLDNLLAQIGDQYADLFLAAKNLSDAILLSDILRVN
TEITKAPLSASMIKRYDEHHQDLTLLKALVRQQLPEKYKEIFFDQSKNGYAGYIDGG
ASQEEFYKFIKPILEKMDGTEELLVKLNREDLLRKQRTFDNGSIPHQIHLGELHAILRR
QEDFYPFLKDNREKIEKILTFRIPYYVGPLARGNSRFAWMTRKSEETITPWNFEEVVD
KGASAQSFIERMTNFDKNLPNEKVLPKHSLLYEYFTVYNELTKVKYVTEGMRKPAF
LSGEQKKAIVDLLFKTNRKVTVKQLKEDYFKKIECFDSVEISGVEDRFNASLGTYHD
LLKIIKDKDFLDNEENEDILEDIVLTLTLFEDREMIEERLKTYAHLFDDKVMKQLKRR
RYTGWGRLSRKLINGIRDKQSGKTILDFLKSDGFANRNFMQLIHDDSLTFKEDIQKAQ
VSGQGDSLHEHIANLAGSPAIKKGILQTVKVVDELVKVMGRHKPENIVIEMARENQT
TQKGQKNSRERMKRIEEGIKELGSQILKEHPVENTQLQNEKLYLYYLQNGRDMYVD
QELDINRLSDYDVDHIVPQSFLKDDSIDNKVLTRSDKNRGKSDNVPSEEVVKKMKN
YWRQLLNAKLITQRKFDNLTKAERGGLSELDKAGFIKRQLVETRQITKHVAQILDSR
MNTKYDENDKLIREVKVITLKSKLVSDFRKDFQFYKVREINNYHHAHDAYLNAVVG
TALIKKYPKLESEFVYGDYKVYDVRKMIAKSEQEIGKATAKYFFYSNIMNFFKTEITL
ANGEIRKRPLIETNGETGEIVWDKGRDFATVRKVLSMPQVNIVKKTEVQTGGFSKESI
LPKRNSDKLIARKKDWDPKKYGGFVSPTVAYSVLVVAKVEKGKSKKLKSVKELLGI
TIMERSSFEKNPIDFLEAKGYKEVKKDLIIKLPKYSLFELENGRKRMLASARELQKGN
ELALPSKYVNFLYLASHYEKLKGSPEDNEQKQLFVEQHKHYLDEIIEQISEFSKRVILA
DANLDKVLSAYNKHRDKPIREQAENIIHLFTLTNLGAPAAFKYFDTTIDRKQYRSTKE
VLDATLIHQSITGLYETRIDLSQLGGDSGGSKRTADGSEFEPKKKRKV

[0396] Exemplary base editors comprise sequences that are at least 85%, at least 90%, at least 95%, at least 98%, at least 99%, or at least 99.5% identical to any of the following amino acid sequences:

ABE8e
(SEQ ID NO: 376)
MKRTADGSEFESPKKKRKVSEVEFSHEYWMRHALTLAKRARDEREVPVGAV
LVLNNRVIGEGWNRAIGLHDPTAHAEIMALRQGGLVMQNYRLIDATLYVTFEPCVM
CAGAMIHSRIGRVVFGVRNSKRGAAGSLMNVLNYPGMNHRVEITEGILADECAALL
CDFYRMPRQVFNAQKKAQSSINSGGSSGGSSGSETPGTSESATPESSGGSSGGSDKKY
SIGLAIGTNSVGWAVITDEYKVPSKKFKVLGNTDRHSIKKNLIGALLFDSGETAEATR
LKRTARRRYTRRKNRICYLQEIFSNEMAKVDDSFFHRLEESFLVEEDKKHERHPIFGN
IVDEVAYHEKYPTIYHLRKKLVDSTDKADLRLIYLALAHMIKFRGHFLIEGDLNPDNS
DVDKLFIQLVQTYNQLFEENPINASGVDAKAILSARLSKSRRLENLIAQLPGEKKNGL
FGNLIALSLGLTPNFKSNFDLAEDAKLQLSKDTYDDDLDNLLAQIGDQYADLFLAAK
NLSDAILLSDILRVNTEITKAPLSASMIKRYDEHHQDLTLLKALVRQQLPEKYKEIFFD
QSKNGYAGYIDGGASQEEFYKFIKPILEKMDGTEELLVKLNREDLLRKQRTFDNGSIP
HQIHLGELHAILRRQEDFYPFLKDNREKIEKILTFRIPYYVGPLARGNSRFAWMTRKS
EETITPWNFEEVVDKGASAQSFIERMTNFDKNLPNEKVLPKHSLLYEYFTVYNELTK
VKYVTEGMRKPAFLSGEQKKAIVDLLFKTNRKVTVKQLKEDYFKKIECFDSVEISGV
EDRFNASLGTYHDLLKIIKDKDFLDNEENEDILEDIVLTLTLFEDREMIEERLKTYAHL
FDDKVMKQLKRRRYTGWGRLSRKLINGIRDKQSGKTILDFLKSDGFANRNFMQLIH
DDSLTFKEDIQKAQVSGQGDSLHEHIANLAGSPAIKKGILQTVKVVDELVKVMGRHK
PENIVIEMARENQTTQKGQKNSRERMKRIEEGIKELGSQILKEHPVENTQLQNEKLYL
YYLQNGRDMYVDQELDINRLSDYDVDHIVPQSFLKDDSIDNKVLTRSDKNRGKSDN
VPSEEVVKKMKNYWRQLLNAKLITQRKFDNLTKAERGGLSELDKAGFIKRQLVETR
QITKHVAQILDSRMNTKYDENDKLIREVKVITLKSKLVSDFRKDFQFYKVREINNYH
HAHDAYLNAVVGTALIKKYPKLESEFVYGDYKVYDVRKMIAKSEQEIGKATAKYFF
YSNIMNFFKTEITLANGEIRKRPLIETNGETGEIVWDKGRDFATVRKVLSMPQVNIVK
KTEVQTGGFSKESILPKRNSDKLIARKKDWDPKKYGGFDSPTVAYSVLVVAKVEKG
KSKKLKSVKELLGITIMERSSFEKNPIDFLEAKGYKEVKKDLIIKLPKYSLFELENGRK
RMLASAGELQKGNELALPSKYVNFLYLASHYEKLKGSPEDNEQKQLFVEQHKHYLD
EIIEQISEFSKRVILADANLDKVLSAYNKHRDKPIREQAENIIHLFTLTNLGAPAAFKYF
DTTIDRKRYTSTKEVLDATLIHQSITGLYETRIDLSQLGGDSGGSKRTADGSEFEPKKK
RKV
ABESe-dimer
(SEQ ID NO: 377)
MKRTADGSEFESPKKKRKVSEVEFSHEYWMRHALTLAKRAWDEREVPVGAVLVHN
NRVIGEGWNRPIGRHDPTAHAEIMALRQGGLVMQNYRLIDATLYVTLEPCVMCAGA
MIHSRIGRVVFGARDAKTGAAGSLMDVLHHPGMNHRVEITEGILADECAALLSDFFR
MRRQEIKAQKKAQSSTDSGGSSGGSSGSETPGTSESATPESSGGSSGGSSEVEFSHEY
WMRHALTLAKRARDEREVPVGAVLVLNNRVIGEGWNRAIGLHDPTAHAEIMALRQ
GGLVMQNYRLIDATLYVTFEPCVMCAGAMIHSRIGRVVFGVRNSKRGAAGSLMNV
LNYPGMNHRVEITEGILADECAALLCDFYRMPRQVFNAQKKAQSSINSGGSSGGSSG
SETPGTSESATPESSGGSSGGSDKKYSIGLAIGTNSVGWAVITDEYKVPSKKFKVLGN
TDRHSIKKNLIGALLFDSGETAEATRLKRTARRRYTRRKNRICYLQEIFSNEMAKVDD
SFFHRLEESFLVEEDKKHERHPIFGNIVDEVAYHEKYPTIYHLRKKLVDSTDKADLRL
IYLALAHMIKFRGHFLIEGDLNPDNSDVDKLFIQLVQTYNQLFEENPINASGVDAKAI
LSARLSKSRRLENLIAQLPGEKKNGLFGNLIALSLGLTPNFKSNFDLAEDAKLQLSKD
TYDDDLDNLLAQIGDQYADLFLAAKNLSDAILLSDILRVNTEITKAPLSASMIKRYDE
HHQDLTLLKALVRQQLPEKYKEIFFDQSKNGYAGYIDGGASQEEFYKFIKPILEKMD
GTEELLVKLNREDLLRKQRTFDNGSIPHQIHLGELHAILRRQEDFYPFLKDNREKIEKI
LTFRIPYYVGPLARGNSRFAWMTRKSEETITPWNFEEVVDKGASAQSFIERMTNFDK
NLPNEKVLPKHSLLYEYFTVYNELTKVKYVTEGMRKPAFLSGEQKKAIVDLLFKTNR
KVTVKQLKEDYFKKIECFDSVEISGVEDRFNASLGTYHDLLKIIKDKDFLDNEENEDI
LEDIVLTLTLFEDREMIEERLKTYAHLFDDKVMKQLKRRRYTGWGRLSRKLINGIRD
KQSGKTILDFLKSDGFANRNFMQLIHDDSLTFKEDIQKAQVSGQGDSLHEHIANLAG
SPAIKKGILQTVKVVDELVKVMGRHKPENIVIEMARENQTTQKGQKNSRERMKRIEE
GIKELGSQILKEHPVENTQLQNEKLYLYYLQNGRDMYVDQELDINRLSDYDVDHIVP
QSFLKDDSIDNKVLTRSDKNRGKSDNVPSEEVVKKMKNYWRQLLNAKLITQRKFDN
LTKAERGGLSELDKAGFIKRQLVETRQITKHVAQILDSRMNTKYDENDKLIREVKVIT
LKSKLVSDFRKDFQFYKVREINNYHHAHDAYLNAVVGTALIKKYPKLESEFVYGDY
KVYDVRKMIAKSEQEIGKATAKYFFYSNIMNFFKTEITLANGEIRKRPLIETNGETGEI
VWDKGRDFATVRKVLSMPQVNIVKKTEVQTGGFSKESILPKRNSDKLIARKKDWDP
KKYGGFDSPTVAYSVLVVAKVEKGKSKKLKSVKELLGITIMERSSFEKNPIDFLEAK
GYKEVKKDLIIKLPKYSLFELENGRKRMLASAGELQKGNELALPSKYVNFLYLASHY
EKLKGSPEDNEQKQLFVEQHKHYLDEIIEQISEFSKRVILADANLDKVLSAYNKHRDK
PIREQAENIIHLFTLTNLGAPAAFKYFDTTIDRKRYTSTKEVLDATLIHQSITGLYETRI
DLSQLGGDSGGSKRTADGSEFEPKKKRKV
SaABE8e
(SEQ ID NO: 378)
MKRTADGSEFESPKKKRKVSEVEFSHEYWMRHALTLAKRARDEREVPVGAVLVLN
NRVIGEGWNRAIGLHDPTAHAEIMALRQGGLVMQNYRLIDATLYVTFEPCVMCAGA
MIHSRIGRVVFGVRNSKRGAAGSLMNVLNYPGMNHRVEITEGILADECAALLCDFY
RMPRQVFNAQKKAQSSINSGGSSGGSSGSETPGTSESATPESSGGSSGGSGKRNYILG
LAIGITSVGYGIIDYETRDVIDAGVRLFKEANVENNEGRRSKRGARRLKRRRRHRIQR
VKKLLFDYNLLTDHSELSGINPYEARVKGLSQKLSEEEFSAALLHLAKRRGVHNVNE
VEEDTGNELSTKEQISRNSKALEEKYVAELQLERLKKDGEVRGSINRFKTSDYVKEA
KQLLKVQKAYHQLDQSFIDTYIDLLETRRTYYEGPGEGSPFGWKDIKEWYEMLMGH
CTYFPEELRSVKYAYNADLYNALNDLNNLVITRDENEKLEYYEKFQIIENVFKQKKK
PTLKQIAKEILVNEEDIKGYRVTSTGKPEFTNLKVYHDIKDITARKEIIENAELLDQIAK
ILTIYQSSEDIQEELTNLNSELTQEEIEQISNLKGYTGTHNLSLKAINLILDELWHTNDN
QIAIFNRLKLVPKKVDLSQQKEIPTTLVDDFILSPVVKRSFIQSIKVINAIIKKYGLPNDII
IELAREKNSKDAQKMINEMQKRNRQTNERIEEIIRTTGKENAKYLIEKIKLHDMQEGK
CLYSLEAIPLEDLLNNPFNYEVDHIIPRSVSFDNSFNNKVLVKQEENSKKGNRTPFQY
LSSSDSKISYETFKKHILNLAKGKGRISKTKKEYLLEERDINRFSVQKDFINRNLVDTR
YATRGLMNLLRSYFRVNNLDVKVKSINGGFTSFLRRKWKFKKERNKGYKHHAEDA
LIIANADFIFKEWKKLDKAKKVMENQMFEEKQAESMPEIETEQEYKEIFITPHQIKHIK
DFKDYKYSHRVDKKPNRELINDTLYSTRKDDKGNTLIVNNLNGLYDKDNDKLKKLI
NKSPEKLLMYHHDPQTYQKLKLIMEQYGDEKNPLYKYYEETGNYLTKYSKKDNGP
VIKKIKYYGNKLNAHLDITDDYPNSRNKVVKLSLKPYRFDVYLDNGVYKFVTVKNL
DVIKKENYYEVNSKCYEEAKKLKKISNQAEFIASFYNNDLIKINGELYRVIGVNNDLL
NRIEVNMIDITYREYLENMNDKRPPRIIKTIASKTQSIKKYSTDILGNLYEVKSKKHPQI
IKKGSGGSKRTADGSEFEPKKKRKV
SaABESe-dimer
(SEQ ID NO: 379)
MKRTADGSEFESPKKKRKVSEVEFSHEYWMRHALTLAKRAWDEREVPVGAVLVHN
NRVIGEGWNRPIGRHDPTAHAEIMALRQGGLVMQNYRLIDATLYVTLEPCVMCAGA
MIHSRIGRVVFGARDAKTGAAGSLMDVLHHPGMNHRVEITEGILADECAALLSDFFR
MRRQEIKAQKKAQSSTDSGGSSGGSSGSETPGTSESATPESSGGSSGGSSEVEFSHEY
WMRHALTLAKRARDEREVPVGAVLVLNNRVIGEGWNRAIGLHDPTAHAEIMALRQ
GGLVMQNYRLIDATLYVTFEPCVMCAGAMIHSRIGRVVFGVRNSKRGAAGSLMNV
LNYPGMNHRVEITEGILADECAALLCDFYRMPRQVFNAQKKAQSSINSGGSSGGSSG
SETPGTSESATPESSGGSSGGSGKRNYILGLAIGITSVGYGIIDYETRDVIDAGVRLFKE
ANVENNEGRRSKRGARRLKRRRRHRIQRVKKLLFDYNLLTDHSELSGINPYEARVK
GLSQKLSEEEFSAALLHLAKRRGVHNVNEVEEDTGNELSTKEQISRNSKALEEKYVA
ELQLERLKKDGEVRGSINRFKTSDYVKEAKQLLKVQKAYHQLDQSFIDTYIDLLETR
RTYYEGPGEGSPFGWKDIKEWYEMLMGHCTYFPEELRSVKYAYNADLYNALNDLN
NLVITRDENEKLEYYEKFQIIENVFKQKKKPTLKQIAKEILVNEEDIKGYRVTSTGKPE
FTNLKVYHDIKDITARKEIIENAELLDQIAKILTIYQSSEDIQEELTNLNSELTQEEIEQIS
NLKGYTGTHNLSLKAINLILDELWHTNDNQIAIFNRLKLVPKKVDLSQQKEIPTTLVD
DFILSPVVKRSFIQSIKVINAIIKKYGLPNDIIIELAREKNSKDAQKMINEMQKRNRQTN
ERIEEIIRTTGKENAKYLIEKIKLHDMQEGKCLYSLEAIPLEDLLNNPFNYEVDHIIPRS
VSFDNSFNNKVLVKQEENSKKGNRTPFQYLSSSDSKISYETFKKHILNLAKGKGRISK
TKKEYLLEERDINRFSVQKDFINRNLVDTRYATRGLMNLLRSYFRVNNLDVKVKSIN
GGFTSFLRRKWKFKKERNKGYKHHAEDALIIANADFIFKEWKKLDKAKKVMENQM
FEEKQAESMPEIETEQEYKEIFITPHQIKHIKDFKDYKYSHRVDKKPNRELINDTLYST
RKDDKGNTLIVNNLNGLYDKDNDKLKKLINKSPEKLLMYHHDPQTYQKLKLIMEQY
GDEKNPLYKYYEETGNYLTKYSKKDNGPVIKKIKYYGNKLNAHLDITDDYPNSRNK
VVKLSLKPYRFDVYLDNGVYKFVTVKNLDVIKKENYYEVNSKCYEEAKKLKKISNQ
AEFIASFYNNDLIKINGELYRVIGVNNDLLNRIEVNMIDITYREYLENMNDKRPPRIIK
TIASKTQSIKKYSTDILGNLYEVKSKKHPQIIKKGSGGSKRTADGSEFEPKKKRKV
LbABE8e
(SEQ ID NO: 380)
MKRTADGSEFESPKKKRKVSEVEFSHEYWMRHALTLAKRARDEREVPVGAVLVLN
NRVIGEGWNRAIGLHDPTAHAEIMALRQGGLVMQNYRLIDATLYVTFEPCVMCAGA
MIHSRIGRVVFGVRNSKRGAAGSLMNVLNYPGMNHRVEITEGILADECAALLCDFY
RMPRQVFNAQKKAQSSINSGGSSGGSSGSETPGTSESATPESSGGSSGGSSKLEKFTN
CYSLSKTLRFKAIPVGKTQENIDNKRLLVEDEKRAEDYKGVKKLLDRYYLSFINDVL
HSIKLKNLNNYISLFRKKTRTEKENKELENLEINLRKEIAKAFKGNEGYKSLFKKDIIE
TILPEFLDDKDEIALVNSFNGFTTAFTGFFDNRENMFSEEAKSTSIAFRCINENLTRYIS
NMDIFEKVDAIFDKHEVQEIKEKILNSDYDVEDFFEGEFFNFVLTQEGIDVYNAIIGGF
VTESGEKIKGLNEYINLYNQKTKQKLPKFKPLYKQVLSDRESLSFYGEGYTSDEEVLE
VFRNTLNKNSEIFSSIKKLEKLFKNFDEYSSAGIFVKNGPAISTISKDIFGEWNVIRDK
WNAEYDDIHLKKKAVVTEKYEDDRRKSFKKIGSFSLEQLQEYADADLSVVEKLKEIII
QKVDEIYKVYGSSEKLFDADFVLEKSLKKNDAVVAIMKDLLDSVKSFENYIKAFFGE
GKETNRDESFYGDFVLAYDILLKVDHIYDAIRNYVTQKPYSKDKFKLYFQNPQFMG
GWDKDKETDYRATILRYGSKYYLAIMDKKYAKCLQKIDKDDVNGNYEKINYKLLP
GPNKMLPKVFFSKKWMAYYNPSEDIQKIYKNGTFKKGDMFNLNDCHKLIDFFKDSIS
RYPKWSNAYDFNFSETEKYKDIAGFYREVEEQGYKVSFESASKKEVDKLVEEGKLY
MFQIYNKDFSDKSHGTPNLHTMYFKLLFDENNHGQIRLSGGAELFMRRASLKKEEL
VVHPANSPIANKNPDNPKKTTTLSYDVYKDKRFSEDQYELHIPIAINKCPKNIFKINTE
VRVLLKHDDNPYVIGIARGERNLLYIVVVDGKGNIVEQYSLNEIINNFNGIRIKTDYHS
LLDKKEKERFEARQNWTSIENIKELKAGYISQVVHKICELVEKYDAVIALEDLNSGFK
NSRVKVEKQVYQKFEKMLIDKLNYMVDKKSNPCATGGALKGYQITNKFESFKSMST
QNGFIFYIPAWLTSKIDPSTGFVNLLKTKYTSIADSKKFISSFDRIMYVPEEDLFEFALD
YKNFSRTDADYIKKWKLYSYGNRIRIFRNPKKNNVFDWEEVCLTSAYKELFNKYGIN
YQQGDIRALLCEQSDKAFYSSFMALMSLMLQMRNSITGRTDVDFLISPVKNSDGIFY
DSRNYEAQENAILPKNADANGAYNIARKVLWAIGQFKKAEDEKLDKVKIAISNKEW
LEYAQTSVKSGGSKRTADGSEFEPKKKRKV
LbABESe-dimer
(SEQ ID NO: 381)
MKRTADGSEFESPKKKRKVSEVEFSHEYWMRHALTLAKRAWDEREVPVGAVLVHN
NRVIGEGWNRPIGRHDPTAHAEIMALRQGGLVMQNYRLIDATLYVTLEPCVMCAGA
MIHSRIGRVVFGARDAKTGAAGSLMDVLHHPGMNHRVEITEGILADECAALLSDFFR
MRRQEIKAQKKAQSSTDSGGSSGGSSGSETPGTSESATPESSGGSSGGSSEVEFSHEY
WMRHALTLAKRARDEREVPVGAVLVLNNRVIGEGWNRAIGLHDPTAHAEIMALRQ
GGLVMQNYRLIDATLYVTFEPCVMCAGAMIHSRIGRVVFGVRNSKRGAAGSLMNV
LNYPGMNHRVEITEGILADECAALLCDFYRMPRQVFNAQKKAQSSINSGGSSGGSSG
SETPGTSESATPESSGGSSGGSSKLEKFTNCYSLSKTLRFKAIPVGKTQENIDNKRLLV
EDEKRAEDYKGVKKLLDRYYLSFINDVLHSIKLKNLNNYISLFRKKTRTEKENKELE
NLEINLRKEIAKAFKGNEGYKSLFKKDIIETILPEFLDDKDEIALVNSFNGFTTAFTGFF
DNRENMFSEEAKSTSIAFRCINENLTRYISNMDIFEKVDAIFDKHEVQEIKEKILNSDY
DVEDFFEGEFFNFVLTQEGIDVYNAIIGGFVTESGEKIKGLNEYINLYNQKTKQKLPKF
KPLYKQVLSDRESLSFYGEGYTSDEEVLEVFRNTLNKNSEIFSSIKKLEKLFKNFDEYS
SAGIFVKNGPAISTISKDIFGEWNVIRDKWNAEYDDIHLKKKAVVTEKYEDDRRKSF
KKIGSFSLEQLQEYADADLSVVEKLKEIIIQKVDEIYKVYGSSEKLFDADFVLEKSLKK
NDAVVAIMKDLLDSVKSFENYIKAFFGEGKETNRDESFYGDFVLAYDILLKVDHIYD
AIRNYVTQKPYSKDKFKLYFQNPQFMGGWDKDKETDYRATILRYGSKYYLAIMDK
KYAKCLQKIDKDDVNGNYEKINYKLLPGPNKMLPKVFFSKKWMAYYNPSEDIQKIY
KNGTFKKGDMFNLNDCHKLIDFFKDSISRYPKWSNAYDFNFSETEKYKDIAGFYREV
EEQGYKVSFESASKKEVDKLVEEGKLYMFQIYNKDFSDKSHGTPNLHTMYFKLLFD
ENNHGQIRLSGGAELFMRRASLKKEELVVHPANSPIANKNPDNPKKTTTLSYDVYKD
KRFSEDQYELHIPIAINKCPKNIFKINTEVRVLLKHDDNPYVIGIARGERNLLYIVVVD
GKGNIVEQYSLNEIINNFNGIRIKTDYHSLLDKKEKERFEARQNWTSIENIKELKAGYI
SQVVHKICELVEKYDAVIALEDLNSGFKNSRVKVEKQVYQKFEKMLIDKLNYMVDK
KSNPCATGGALKGYQITNKFESFKSMSTQNGFIFYIPAWLTSKIDPSTGFVNLLKTKY
TSIADSKKFISSFDRIMYVPEEDLFEFALDYKNFSRTDADYIKKWKLYSYGNRIRIFRN
PKKNNVFDWEEVCLTSAYKELFNKYGINYQQGDIRALLCEQSDKAFYSSFMALMSL
MLQMRNSITGRTDVDFLISPVKNSDGIFYDSRNYEAQENAILPKNADANGAYNIARK
VLWAIGQFKKAEDEKLDKVKIAISNKEWLEYAQTSVKSGGSKRTADGSEFEPKKKR
KV
LbABE7.10
(SEQ ID NO: 382)
MKRTADGSEFESPKKKRKVSEVEFSHEYWMRHALTLAKRAWDEREVPVGAVLVHN
NRVIGEGWNRPIGRHDPTAHAEIMALRQGGLVMQNYRLIDATLYVTLEPCVMCAGA
MIHSRIGRVVFGARDAKTGAAGSLMDVLHHPGMNHRVEITEGILADECAALLSDFFR
MRRQEIKAQKKAQSSTDSGGSSGGSSGSETPGTSESATPESSGGSSGGSSEVEFSHEY
WMRHALTLAKRARDEREVPVGAVLVLNNRVIGEGWNRAIGLHDPTAHAEIMALRQ
GGLVMQNYRLIDATLYVTFEPCVMCAGAMIHSRIGRVVFGVRNAKTGAAGSLMDV
LHYPGMNHRVEITEGILADECAALLCYFFRMPRQVFNAQKKAQSSTDSGGSSGGSSG
SETPGTSESATPESSGGSSGGSSKLEKFTNCYSLSKTLRFKAIPVGKTQENIDNKRLLV
EDEKRAEDYKGVKKLLDRYYLSFINDVLHSIKLKNLNNYISLFRKKTRTEKENKELE
NLEINLRKEIAKAFKGNEGYKSLFKKDIIETILPEFLDDKDEIALVNSFNGFTTAFTGFF
DNRENMFSEEAKSTSIAFRCINENLTRYISNMDIFEKVDAIFDKHEVQEIKEKILNSDY
DVEDFFEGEFFNFVLTQEGIDVYNAIIGGFVTESGEKIKGLNEYINLYNQKTKQKLPKF
KPLYKQVLSDRESLSFYGEGYTSDEEVLEVFRNTLNKNSEIFSSIKKLEKLFKNFDEYS
SAGIFVKNGPAISTISKDIFGEWNVIRDKWNAEYDDIHLKKKAVVTEKYEDDRRKSF
KKIGSFSLEQLQEYADADLSVVEKLKEIIIQKVDEIYKVYGSSEKLFDADFVLEKSLKK
NDAVVAIMKDLLDSVKSFENYIKAFFGEGKETNRDESFYGDFVLAYDILLKVDHIYD
AIRNYVTQKPYSKDKFKLYFQNPQFMGGWDKDKETDYRATILRYGSKYYLAIMDK
KYAKCLQKIDKDDVNGNYEKINYKLLPGPNKMLPKVFFSKKWMAYYNPSEDIQKIY
KNGTFKKGDMFNLNDCHKLIDFFKDSISRYPKWSNAYDFNFSETEKYKDIAGFYREV
EEQGYKVSFESASKKEVDKLVEEGKLYMFQIYNKDFSDKSHGTPNLHTMYFKLLFD
ENNHGQIRLSGGAELFMRRASLKKEELVVHPANSPIANKNPDNPKKTTTLSYDVYKD
KRFSEDQYELHIPIAINKCPKNIFKINTEVRVLLKHDDNPYVIGIARGERNLLYIVVVD
GKGNIVEQYSLNEIINNFNGIRIKTDYHSLLDKKEKERFEARQNWTSIENIKELKAGYI
SQVVHKICELVEKYDAVIALEDLNSGFKNSRVKVEKQVYQKFEKMLIDKLNYMVDK
KSNPCATGGALKGYQITNKFESFKSMSTQNGFIFYIPAWLTSKIDPSTGFVNLLKTKY
TSIADSKKFISSFDRIMYVPEEDLFEFALDYKNFSRTDADYIKKWKLYSYGNRIRIFRN
PKKNNVFDWEEVCLTSAYKELFNKYGINYQQGDIRALLCEQSDKAFYSSFMALMSL
MLQMRNSITGRTDVDFLISPVKNSDGIFYDSRNYEAQENAILPKNADANGAYNIARK
VLWAIGQFKKAEDEKLDKVKIAISNKEWLEYAQTSVKSGGSKRTADGSEFEPKKKR
KV
enAsABESe
(SEQ ID NO: 383)
MKRTADGSEFESPKKKRKVSEVEFSHEYWMRHALTLAKRARDEREVPVGAVLVLN
NRVIGEGWNRAIGLHDPTAHAEIMALRQGGLVMQNYRLIDATLYVTFEPCVMCAGA
MIHSRIGRVVFGVRNSKRGAAGSLMNVLNYPGMNHRVEITEGILADECAALLCDFY
RMPRQVFNAQKKAQSSINSGGSSGGSSGSETPGTSESATPESSGGSSGGSMTQFEGFT
NLYQVSKTLRFELIPQGKTLKHIQEQGFIEEDKARNDHYKELKPIIDRIYKTYADQCL
QLVQLDWENLSAAIDSYRKEKTEETRNALIEEQATYRNAIHDYFIGRTDNLTDAINKR
HAEIYKGLFKAELFNGKVLKQLGTVTTTEHENALLRSFDKFTTYFSGFYRNRKNVFS
AEDISTAIPHRIVQDNFPKFKENCHIFTRLITAVPSLREHFENVKKAIGIFVSTSIEEVFS
FPFYNQLLTQTQIDLYNQLLGGISREAGTEKIKGLNEVLNLAIQKNDETAHIIASLPHR
FIPLFKQILSDRNTLSFILEEFKSDEEVIQSFCKYKTLLRNENVLETAEALFNELNSIDLT
HIFISHKKLETISSALCDHWDTLRNALYERRISELTGKITKSAKEKVQRSLKHEDINLQ
EIISAAGKELSEAFKQKTSEILSHAHAALDQPLPTTLKKQEEKEILKSQLDSLLGLYHL
LDWFAVDESNEVDPEFSARLTGIKLEMEPSLSFYNKARNYATKKPYSVEKFKLNFQ
MPTLARGWDVNREKNNGAILFVKNGLYYLGIMPKQKGRYKALSFEPTEKTSEGFDK
MYYDYFPDAAKMIPKCSTQLKAVTAHFQTHTTPILLSNNFIEPLEITKEIYDLNNPEKE
PKKFQTAYAKKTGDQKGYREALCKWIDFTRDFLSKYTKTTSIDLSSLRPSSQYKDLG
EYYAELNPLLYHISFQRIAEKEIMDAVETGKLYLFQIYNKDFAKGHHGKPNLHTLYW
TGLFSPENLAKTSIKLNGQAELFYRPKSRMKRMAHRLGEKMLNKKLKDQKTPIPDTL
YQELYDYVNHRLSHDLSDEARALLPNVITKEVSHEIIKDRRFTSDKFFFHVPITLNYQ
AANSPSKFNQRVNAYLKEHPETPIIGIARGERNLIYITVIDSTGKILEQRSLNTIQQFDY
QKKLDNREKERVAARQAWSVVGTIKDLKQGYLSQVIHEIVDLMIHYQAVVVLENLN
FGFKSKRTGIAEKAVYQQFEKMLIDKLNCLVLKDYPAEKVGGVLNPYQLTDQFTSFA
KMGTQSGFLFYVPAPYTSKIDPLTGFVDPFVWKTIKNHESRKHFLEGFDFLHYDVKT
GDFILHFKMNRNLSFQRGLPGFMPAWDIVFEKNETQFDAKGTPFIAGKRIVPVIENHR
FTGRYRDLYPANELIALLEEKGIVFRDGSNILPKLLENDDSHAIDTMVALIRSVLQMR
NSNAATGEDYINSPVRDLNGVCFDSRFQNPEWPMDADANGAYHIALKGQLLLNHLK
ESKDLKLQNGISNQDWLAYIQELRNSGGSKRTADGSEFEPKKKRKV
enAsABESe-dimer
(SEQ ID NO: 384)
MKRTADGSEFESPKKKRKVSEVEFSHEYWMRHALTLAKRAWDEREVPVGAVLVHN
NRVIGEGWNRPIGRHDPTAHAEIMALRQGGLVMQNYRLIDATLYVTLEPCVMCAGA
MIHSRIGRVVFGARDAKTGAAGSLMDVLHHPGMNHRVEITEGILADECAALLSDFFR
MRRQEIKAQKKAQSSTDSGGSSGGSSGSETPGTSESATPESSGGSSGGSSEVEFSHEY
WMRHALTLAKRARDEREVPVGAVLVLNNRVIGEGWNRAIGLHDPTAHAEIMALRQ
GGLVMQNYRLIDATLYVTFEPCVMCAGAMIHSRIGRVVFGVRNSKRGAAGSLMNV
LNYPGMNHRVEITEGILADECAALLCDFYRMPRQVFNAQKKAQSSINSGGSSGGSSG
SETPGTSESATPESSGGSSGGSMTQFEGFTNLYQVSKTLRFELIPQGKTLKHIQEQGFI
EEDKARNDHYKELKPIIDRIYKTYADQCLQLVQLDWENLSAAIDSYRKEKTEETRNA
LIEEQATYRNAIHDYFIGRTDNLTDAINKRHAEIYKGLFKAELFNGKVLKQLGTVTTT
EHENALLRSFDKFTTYFSGFYRNRKNVFSAEDISTAIPHRIVQDNFPKFKENCHIFTRLI
TAVPSLREHFENVKKAIGIFVSTSIEEVFSFPFYNQLLTQTQIDLYNQLLGGISREAGTE
KIKGLNEVLNLAIQKNDETAHIIASLPHRFIPLFKQILSDRNTLSFILEEFKSDEEVIQSF
CKYKTLLRNENVLETAEALFNELNSIDLTHIFISHKKLETISSALCDHWDTLRNALYE
RRISELTGKITKSAKEKVQRSLKHEDINLQEIISAAGKELSEAFKQKTSEILSHAHAAL
DQPLPTTLKKQEEKEILKSQLDSLLGLYHLLDWFAVDESNEVDPEFSARLTGIKLEME
PSLSFYNKARNYATKKPYSVEKFKLNFQMPTLARGWDVNREKNNGAILFVKNGLY
YLGIMPKQKGRYKALSFEPTEKTSEGFDKMYYDYFPDAAKMIPKCSTQLKAVTAHF
QTHTTPILLSNNFIEPLEITKEIYDLNNPEKEPKKFQTAYAKKTGDQKGYREALCKWI
DFTRDFLSKYTKTTSIDLSSLRPSSQYKDLGEYYAELNPLLYHISFQRIAEKEIMDAVE
TGKLYLFQIYNKDFAKGHHGKPNLHTLYWTGLFSPENLAKTSIKLNGQAELFYRPKS
RMKRMAHRLGEKMLNKKLKDQKTPIPDTLYQELYDYVNHRLSHDLSDEARALLPN
VITKEVSHEIIKDRRFTSDKFFFHVPITLNYQAANSPSKFNQRVNAYLKEHPETPIIGIA
RGERNLIYITVIDSTGKILEQRSLNTIQQFDYQKKLDNREKERVAARQAWSVVGTIKD
LKQGYLSQVIHEIVDLMIHYQAVVVLENLNFGFKSKRTGIAEKAVYQQFEKMLIDKL
NCLVLKDYPAEKVGGVLNPYQLTDQFTSFAKMGTQSGFLFYVPAPYTSKIDPLTGFV
DPFVWKTIKNHESRKHFLEGFDFLHYDVKTGDFILHFKMNRNLSFQRGLPGFMPAW
DIVFEKNETQFDAKGTPFIAGKRIVPVIENHRFTGRYRDLYPANELIALLEEKGIVFRD
GSNILPKLLENDDSHAIDTMVALIRSVLQMRNSNAATGEDYINSPVRDLNGVCFDSR
FQNPEWPMDADANGAYHIALKGQLLLNHLKESKDLKLQNGISNQDWLAYIQELRNS
GGSKRTADGSEFEPKKKRKV
enAsABE7.10
(SEQ ID NO: 385)
MKRTADGSEFESPKKKRKVSEVEFSHEYWMRHALTLAKRAWDEREVPVGAVLVHN
NRVIGEGWNRPIGRHDPTAHAEIMALRQGGLVMQNYRLIDATLYVTLEPCVMCAGA
MIHSRIGRVVFGARDAKTGAAGSLMDVLHHPGMNHRVEITEGILADECAALLSDFFR
MRRQEIKAQKKAQSSTDSGGSSGGSSGSETPGTSESATPESSGGSSGGSSEVEFSHEY
WMRHALTLAKRARDEREVPVGAVLVLNNRVIGEGWNRAIGLHDPTAHAEIMALRQ
GGLVMQNYRLIDATLYVTFEPCVMCAGAMIHSRIGRVVFGVRNAKTGAAGSLMDV
LHYPGMNHRVEITEGILADECAALLCYFFRMPRQVFNAQKKAQSSTDSGGSSGGSSG
SETPGTSESATPESSGGSSGGSMTQFEGFTNLYQVSKTLRFELIPQGKTLKHIQEQGFI
EEDKARNDHYKELKPIIDRIYKTYADQCLQLVQLDWENLSAAIDSYRKEKTEETRNA
LIEEQATYRNAIHDYFIGRTDNLTDAINKRHAEIYKGLFKAELFNGKVLKQLGTVTTT
EHENALLRSFDKFTTYFSGFYRNRKNVFSAEDISTAIPHRIVQDNFPKFKENCHIFTRLI
TAVPSLREHFENVKKAIGIFVSTSIEEVFSFPFYNQLLTQTQIDLYNQLLGGISREAGTE
KIKGLNEVLNLAIQKNDETAHIIASLPHRFIPLFKQILSDRNTLSFILEEFKSDEEVIQSF
CKYKTLLRNENVLETAEALFNELNSIDLTHIFISHKKLETISSALCDHWDTLRNALYE
RRISELTGKITKSAKEKVQRSLKHEDINLQEIISAAGKELSEAFKQKTSEILSHAHAAL
DQPLPTTLKKQEEKEILKSQLDSLLGLYHLLDWFAVDESNEVDPEFSARLTGIKLEME
PSLSFYNKARNYATKKPYSVEKFKLNFQMPTLARGWDVNREKNNGAILFVKNGLY
YLGIMPKQKGRYKALSFEPTEKTSEGFDKMYYDYFPDAAKMIPKCSTQLKAVTAHF
QTHTTPILLSNNFIEPLEITKEIYDLNNPEKEPKKFQTAYAKKTGDQKGYREALCKWI
DFTRDFLSKYTKTTSIDLSSLRPSSQYKDLGEYYAELNPLLYHISFQRIAEKEIMDAVE
TGKLYLFQIYNKDFAKGHHGKPNLHTLYWTGLFSPENLAKTSIKLNGQAELFYRPKS
RMKRMAHRLGEKMLNKKLKDQKTPIPDTLYQELYDYVNHRLSHDLSDEARALLPN
VITKEVSHEIIKDRRFTSDKFFFHVPITLNYQAANSPSKFNQRVNAYLKEHPETPIIGIA
RGERNLIYITVIDSTGKILEQRSLNTIQQFDYQKKLDNREKERVAARQAWSVVGTIKD
LKQGYLSQVIHEIVDLMIHYQAVVVLENLNFGFKSKRTGIAEKAVYQQFEKMLIDKL
NCLVLKDYPAEKVGGVLNPYQLTDQFTSFAKMGTQSGFLFYVPAPYTSKIDPLTGFV
DPFVWKTIKNHESRKHFLEGFDFLHYDVKTGDFILHFKMNRNLSFQRGLPGFMPAW
DIVFEKNETQFDAKGTPFIAGKRIVPVIENHRFTGRYRDLYPANELIALLEEKGIVFRD
GSNILPKLLENDDSHAIDTMVALIRSVLQMRNSNAATGEDYINSPVRDLNGVCFDSR
FQNPEWPMDADANGAYHIALKGQLLLNHLKESKDLKLQNGISNQDWLAYIQELRNS
GGSKRTADGSEFEPKKKRKV
SpCas9NG-ABE8e (“NG-ABE8e”)
(SEQ ID NO: 386)
MKRTADGSEFESPKKKRKVSEVEFSHEYWMRHALTLAKRARDEREVPVGAVLVLN
NRVIGEGWNRAIGLHDPTAHAEIMALRQGGLVMQNYRLIDATLYVTFEPCVMCAGA
MIHSRIGRVVFGVRNSKRGAAGSLMNVLNYPGMNHRVEITEGILADECAALLCDFY
RMPRQVFNAQKKAQSSINSGGSSGGSSGSETPGTSESATPESSGGSSGGSDKKYSIGL
AIGTNSVGWAVITDEYKVPSKKFKVLGNTDRHSIKKNLIGALLFDSGETAEATRLKR
TARRRYTRRKNRICYLQEIFSNEMAKVDDSFFHRLEESFLVEEDKKHERHPIFGNIVD
EVAYHEKYPTIYHLRKKLVDSTDKADLRLIYLALAHMIKFRGHFLIEGDLNPDNSDV
DKLFIQLVQTYNQLFEENPINASGVDAKAILSARLSKSRRLENLIAQLPGEKKNGLFG
NLIALSLGLTPNFKSNFDLAEDAKLQLSKDTYDDDLDNLLAQIGDQYADLFLAAKNL
SDAILLSDILRVNTEITKAPLSASMIKRYDEHHQDLTLLKALVRQQLPEKYKEIFFDQS
KNGYAGYIDGGASQEEFYKFIKPILEKMDGTEELLVKLNREDLLRKQRTFDNGSIPHQ
IHLGELHAILRRQEDFYPFLKDNREKIEKILTFRIPYYVGPLARGNSRFAWMTRKSEET
ITPWNFEEVVDKGASAQSFIERMTNFDKNLPNEKVLPKHSLLYEYFTVYNELTKVKY
VTEGMRKPAFLSGEQKKAIVDLLFKTNRKVTVKQLKEDYFKKIECFDSVEISGVEDR
FNASLGTYHDLLKIIKDKDFLDNEENEDILEDIVLTLTLFEDREMIEERLKTYAHLFDD
KVMKQLKRRRYTGWGRLSRKLINGIRDKQSGKTILDFLKSDGFANRNFMQLIHDDSL
TFKEDIQKAQVSGQGDSLHEHIANLAGSPAIKKGILQTVKVVDELVKVMGRHKPENI
VIEMARENQTTQKGQKNSRERMKRIEEGIKELGSQILKEHPVENTQLQNEKLYLYYL
QNGRDMYVDQELDINRLSDYDVDHIVPQSFLKDDSIDNKVLTRSDKNRGKSDNVPS
EEVVKKMKNYWRQLLNAKLITQRKFDNLTKAERGGLSELDKAGFIKRQLVETRQIT
KHVAQILDSRMNTKYDENDKLIREVKVITLKSKLVSDFRKDFQFYKVREINNYHHAH
DAYLNAVVGTALIKKYPKLESEFVYGDYKVYDVRKMIAKSEQEIGKATAKYFFYSNI
MNFFKTEITLANGEIRKRPLIETNGETGEIVWDKGRDFATVRKVLSMPQVNIVKKTEV
QTGGFSKESIRPKRNSDKLIARKKDWDPKKYGGFVSPTVAYSVLVVAKVEKGKSKK
LKSVKELLGITIMERSSFEKNPIDFLEAKGYKEVKKDLIIKLPKYSLFELENGRKRMLA
SARFLQKGNELALPSKYVNFLYLASHYEKLKGSPEDNEQKQLFVEQHKHYLDEIIEQI
SEFSKRVILADANLDKVLSAYNKHRDKPIREQAENIIHLFTLTNLGAPRAFKYFDTTID
RKVYRSTKEVLDATLIHQSITGLYETRIDLSQLGGDSGGSKRTADGSEFEPKKKRKV
NG-ABE8e-dimer
(SEQ ID NO: 387)
MKRTADGSEFESPKKKRKVSEVEFSHEYWMRHALTLAKRAWDEREVPVGAVLVHN
NRVIGEGWNRPIGRHDPTAHAEIMALRQGGLVMQNYRLIDATLYVTLEPCVMCAGA
MIHSRIGRVVFGARDAKTGAAGSLMDVLHHPGMNHRVEITEGILADECAALLSDFFR
MRRQEIKAQKKAQSSTDSGGSSGGSSGSETPGTSESATPESSGGSSGGSSEVEFSHEY
WMRHALTLAKRARDEREVPVGAVLVLNNRVIGEGWNRAIGLHDPTAHAEIMALRQ
GGLVMQNYRLIDATLYVTFEPCVMCAGAMIHSRIGRVVFGVRNSKRGAAGSLMNV
LNYPGMNHRVEITEGILADECAALLCDFYRMPRQVFNAQKKAQSSINSGGSSGGSSG
SETPGTSESATPESSGGSSGGSDKKYSIGLAIGTNSVGWAVITDEYKVPSKKFKVLGN
TDRHSIKKNLIGALLFDSGETAEATRLKRTARRRYTRRKNRICYLQEIFSNEMAKVDD
SFFHRLEESFLVEEDKKHERHPIFGNIVDEVAYHEKYPTIYHLRKKLVDSTDKADLRL
IYLALAHMIKFRGHFLIEGDLNPDNSDVDKLFIQLVQTYNQLFEENPINASGVDAKAI
LSARLSKSRRLENLIAQLPGEKKNGLFGNLIALSLGLTPNFKSNFDLAEDAKLQLSKD
TYDDDLDNLLAQIGDQYADLFLAAKNLSDAILLSDILRVNTEITKAPLSASMIKRYDE
HHQDLTLLKALVRQQLPEKYKEIFFDQSKNGYAGYIDGGASQEEFYKFIKPILEKMD
GTEELLVKLNREDLLRKQRTFDNGSIPHQIHLGELHAILRRQEDFYPFLKDNREKIEKI
LTFRIPYYVGPLARGNSRFAWMTRKSEETITPWNFEEVVDKGASAQSFIERMTNFDK
NLPNEKVLPKHSLLYEYFTVYNELTKVKYVTEGMRKPAFLSGEQKKAIVDLLFKTNR
KVTVKQLKEDYFKKIECFDSVEISGVEDRFNASLGTYHDLLKIIKDKDFLDNEENEDI
LEDIVLTLTLFEDREMIEERLKTYAHLFDDKVMKQLKRRRYTGWGRLSRKLINGIRD
KQSGKTILDFLKSDGFANRNFMQLIHDDSLTFKEDIQKAQVSGQGDSLHEHIANLAG
SPAIKKGILQTVKVVDELVKVMGRHKPENIVIEMARENQTTQKGQKNSRERMKRIEE
GIKELGSQILKEHPVENTQLQNEKLYLYYLQNGRDMYVDQELDINRLSDYDVDHIVP
QSFLKDDSIDNKVLTRSDKNRGKSDNVPSEEVVKKMKNYWRQLLNAKLITQRKFDN
LTKAERGGLSELDKAGFIKRQLVETRQITKHVAQILDSRMNTKYDENDKLIREVKVIT
LKSKLVSDFRKDFQFYKVREINNYHHAHDAYLNAVVGTALIKKYPKLESEFVYGDY
KVYDVRKMIAKSEQEIGKATAKYFFYSNIMNFFKTEITLANGEIRKRPLIETNGETGEI
VWDKGRDFATVRKVLSMPQVNIVKKTEVQTGGFSKESIRPKRNSDKLIARKKDWDP
KKYGGFVSPTVAYSVLVVAKVEKGKSKKLKSVKELLGITIMERSSFEKNPIDFLEAK
GYKEVKKDLIIKLPKYSLFELENGRKRMLASARFLQKGNELALPSKYVNFLYLASHY
EKLKGSPEDNEQKQLFVEQHKHYLDEIIEQISEFSKRVILADANLDKVLSAYNKHRDK
PIREQAENIIHLFTLTNLGAPRAFKYFDTTIDRKVYRSTKEVLDATLIHQSITGLYETRI
DLSQLGGDSGGSKRTADGSEFEPKKKRKV
SaKKH-ABE8e(“KKH-ABE8e”)
(SEQ ID NO: 378)
MKRTADGSEFESPKKKRKVSEVEFSHEYWMRHALTLAKRARDEREVPVGAVLVLN
NRVIGEGWNRAIGLHDPTAHAEIMALRQGGLVMQNYRLIDATLYVTFEPCVMCAGA
MIHSRIGRVVFGVRNSKRGAAGSLMNVLNYPGMNHRVEITEGILADECAALLCDFY
RMPRQVFNAQKKAQSSINSGGSSGGSSGSETPGTSESATPESSGGSSGGSGKRNYILG
LAIGITSVGYGIIDYETRDVIDAGVRLFKEANVENNEGRRSKRGARRLKRRRRHRIQR
VKKLLFDYNLLTDHSELSGINPYEARVKGLSQKLSEEEFSAALLHLAKRRGVHNVNE
VEEDTGNELSTKEQISRNSKALEEKYVAELQLERLKKDGEVRGSINRFKTSDYVKEA
KQLLKVQKAYHQLDQSFIDTYIDLLETRRTYYEGPGEGSPFGWKDIKEWYEMLMGH
CTYFPEELRSVKYAYNADLYNALNDLNNLVITRDENEKLEYYEKFQIIENVFKQKKK
PTLKQIAKEILVNEEDIKGYRVTSTGKPEFTNLKVYHDIKDITARKEIIENAELLDQIAK
ILTIYQSSEDIQEELTNLNSELTQEEIEQISNLKGYTGTHNLSLKAINLILDELWHTNDN
QIAIFNRLKLVPKKVDLSQQKEIPTTLVDDFILSPVVKRSFIQSIKVINAIIKKYGLPNDII
IELAREKNSKDAQKMINEMQKRNRQTNERIEEIIRTTGKENAKYLIEKIKLHDMQEGK
CLYSLEAIPLEDLLNNPFNYEVDHIIPRSVSFDNSFNNKVLVKQEENSKKGNRTPFQY
LSSSDSKISYETFKKHILNLAKGKGRISKTKKEYLLEERDINRFSVQKDFINRNLVDTR
YATRGLMNLLRSYFRVNNLDVKVKSINGGFTSFLRRKWKFKKERNKGYKHHAEDA
LIIANADFIFKEWKKLDKAKKVMENQMFEEKQAESMPEIETEQEYKEIFITPHQIKHIK
DFKDYKYSHRVDKKPNRELINDTLYSTRKDDKGNTLIVNNLNGLYDKDNDKLKKLI
NKSPEKLLMYHHDPQTYQKLKLIMEQYGDEKNPLYKYYEETGNYLTKYSKKDNGP
VIKKIKYYGNKLNAHLDITDDYPNSRNKVVKLSLKPYRFDVYLDNGVYKFVTVKNL
DVIKKENYYEVNSKCYEEAKKLKKISNQAEFIASFYNNDLIKINGELYRVIGVNNDLL
NRIEVNMIDITYREYLENMNDKRPPRIIKTIASKTQSIKKYSTDILGNLYEVKSKKHPQI
IKKGSGGSKRTADGSEFEPKKKRKV
SaKKH-ABE8e-dimer
(SEQ ID NO: 379)
MKRTADGSEFESPKKKRKVSEVEFSHEYWMRHALTLAKRAWDEREVPVGAVLVHN
NRVIGEGWNRPIGRHDPTAHAEIMALRQGGLVMQNYRLIDATLYVTLEPCVMCAGA
MIHSRIGRVVFGARDAKTGAAGSLMDVLHHPGMNHRVEITEGILADECAALLSDFFR
MRRQEIKAQKKAQSSTDSGGSSGGSSGSETPGTSESATPESSGGSSGGSSEVEFSHEY
WMRHALTLAKRARDEREVPVGAVLVLNNRVIGEGWNRAIGLHDPTAHAEIMALRQ
GGLVMQNYRLIDATLYVTFEPCVMCAGAMIHSRIGRVVFGVRNSKRGAAGSLMNV
LNYPGMNHRVEITEGILADECAALLCDFYRMPRQVFNAQKKAQSSINSGGSSGGSSG
SETPGTSESATPESSGGSSGGSGKRNYILGLAIGITSVGYGIIDYETRDVIDAGVRLFKE
ANVENNEGRRSKRGARRLKRRRRHRIQRVKKLLFDYNLLTDHSELSGINPYEARVK
GLSQKLSEEEFSAALLHLAKRRGVHNVNEVEEDTGNELSTKEQISRNSKALEEKYVA
ELQLERLKKDGEVRGSINRFKTSDYVKEAKQLLKVQKAYHQLDQSFIDTYIDLLETR
RTYYEGPGEGSPFGWKDIKEWYEMLMGHCTYFPEELRSVKYAYNADLYNALNDLN
NLVITRDENEKLEYYEKFQIIENVFKQKKKPTLKQIAKEILVNEEDIKGYRVTSTGKPE
FTNLKVYHDIKDITARKEIIENAELLDQIAKILTIYQSSEDIQEELTNLNSELTQEEIEQIS
NLKGYTGTHNLSLKAINLILDELWHTNDNQIAIFNRLKLVPKKVDLSQQKEIPTTLVD
DFILSPVVKRSFIQSIKVINAIIKKYGLPNDIIIELAREKNSKDAQKMINEMQKRNRQTN
ERIEEIIRTTGKENAKYLIEKIKLHDMQEGKCLYSLEAIPLEDLLNNPFNYEVDHIIPRS
VSFDNSFNNKVLVKQEENSKKGNRTPFQYLSSSDSKISYETFKKHILNLAKGKGRISK
TKKEYLLEERDINRFSVQKDFINRNLVDTRYATRGLMNLLRSYFRVNNLDVKVKSIN
GGFTSFLRRKWKFKKERNKGYKHHAEDALIIANADFIFKEWKKLDKAKKVMENQM
FEEKQAESMPEIETEQEYKEIFITPHQIKHIKDFKDYKYSHRVDKKPNRELINDTLYST
RKDDKGNTLIVNNLNGLYDKDNDKLKKLINKSPEKLLMYHHDPQTYQKLKLIMEQY
GDEKNPLYKYYEETGNYLTKYSKKDNGPVIKKIKYYGNKLNAHLDITDDYPNSRNK
VVKLSLKPYRFDVYLDNGVYKFVTVKNLDVIKKENYYEVNSKCYEEAKKLKKISNQ
AEFIASFYNNDLIKINGELYRVIGVNNDLLNRIEVNMIDITYREYLENMNDKRPPRIIK
TIASKTQSIKKYSTDILGNLYEVKSKKHPQIIKKGSGGSKRTADGSEFEPKKKRKV
CP1028-ABE8e
(SEQ ID NO: 388)
MKRTADGSEFESPKKKRKVSEVEFSHEYWMRHALTLAKRARDEREVPVGAVLVLN
NRVIGEGWNRAIGLHDPTAHAEIMALRQGGLVMQNYRLIDATLYVTFEPCVMCAGA
MIHSRIGRVVFGVRNSKRGAAGSLMNVLNYPGMNHRVEITEGILADECAALLCDFY
RMPRQVFNAQKKAQSSINSGGSSGGSSGSETPGTSESATPESSGGSSGGSEIGKATAK
YFFYSNIMNFFKTEITLANGEIRKRPLIETNGETGEIVWDKGRDFATVRKVLSMPQVN
IVKKTEVQTGGFSKESILPKRNSDKLIARKKDWDPKKYGGFDSPTVAYSVLVVAKVE
KGKSKKLKSVKELLGITIMERSSFEKNPIDFLEAKGYKEVKKDLIIKLPKYSLFELENG
RKRMLASAGELQKGNELALPSKYVNFLYLASHYEKLKGSPEDNEQKQLFVEQHKHY
LDEIIEQISEFSKRVILADANLDKVLSAYNKHRDKPIREQAENIIHLFTLTNLGAPAAFK
YFDTTIDRKRYTSTKEVLDATLIHQSITGLYETRIDLSQLGGDGGSGGSGGSGGSGGS
GGSGGMDKKYSIGLAIGTNSVGWAVITDEYKVPSKKFKVLGNTDRHSIKKNLIGALL
FDSGETAEATRLKRTARRRYTRRKNRICYLQEIFSNEMAKVDDSFFHRLEESFLVEED
KKHERHPIFGNIVDEVAYHEKYPTIYHLRKKLVDSTDKADLRLIYLALAHMIKFRGH
FLIEGDLNPDNSDVDKLFIQLVQTYNQLFEENPINASGVDAKAILSARLSKSRRLENLI
AQLPGEKKNGLFGNLIALSLGLTPNFKSNFDLAEDAKLQLSKDTYDDDLDNLLAQIG
DQYADLFLAAKNLSDAILLSDILRVNTEITKAPLSASMIKRYDEHHQDLTLLKALVRQ
QLPEKYKEIFFDQSKNGYAGYIDGGASQEEFYKFIKPILEKMDGTEELLVKLNREDLL
RKQRTFDNGSIPHQIHLGELHAILRRQEDFYPFLKDNREKIEKILTFRIPYYVGPLARG
NSRFAWMTRKSEETITPWNFEEVVDKGASAQSFIERMTNFDKNLPNEKVLPKHSLLY
EYFTVYNELTKVKYVTEGMRKPAFLSGEQKKAIVDLLFKTNRKVTVKQLKEDYFKK
IECFDSVEISGVEDRFNASLGTYHDLLKIIKDKDFLDNEENEDILEDIVLTLTLFEDREM
IEERLKTYAHLFDDKVMKQLKRRRYTGWGRLSRKLINGIRDKQSGKTILDFLKSDGF
ANRNFMQLIHDDSLTFKEDIQKAQVSGQGDSLHEHIANLAGSPAIKKGILQTVKVVD
ELVKVMGRHKPENIVIEMARENQTTQKGQKNSRERMKRIEEGIKELGSQILKEHPVE
NTQLQNEKLYLYYLQNGRDMYVDQELDINRLSDYDVDHIVPQSFLKDDSIDNKVLT
RSDKNRGKSDNVPSEEVVKKMKNYWRQLLNAKLITQRKFDNLTKAERGGLSELDK
AGFIKRQLVETRQITKHVAQILDSRMNTKYDENDKLIREVKVITLKSKLVSDFRKDFQ
FYKVREINNYHHAHDAYLNAVVGTALIKKYPKLESEFVYGDYKVYDVRKMIAKSEQ
SGGSKRTADGSEFEPKKKRKV
CP1028-ABE8e-dimer
(SEQ ID NO: 389)
MKRTADGSEFESPKKKRKVSEVEFSHEYWMRHALTLAKRAWDEREVPVGAVLVHN
NRVIGEGWNRPIGRHDPTAHAEIMALRQGGLVMQNYRLIDATLYVTLEPCVMCAGA
MIHSRIGRVVFGARDAKTGAAGSLMDVLHHPGMNHRVEITEGILADECAALLSDFFR
MRRQEIKAQKKAQSSTDSGGSSGGSSGSETPGTSESATPESSGGSSGGSSEVEFSHEY
WMRHALTLAKRARDEREVPVGAVLVLNNRVIGEGWNRAIGLHDPTAHAEIMALRQ
GGLVMQNYRLIDATLYVTFEPCVMCAGAMIHSRIGRVVFGVRNSKRGAAGSLMNV
LNYPGMNHRVEITEGILADECAALLCDFYRMPRQVFNAQKKAQSSINSGGSSGGSSG
SETPGTSESATPESSGGSSGGSEIGKATAKYFFYSNIMNFFKTEITLANGEIRKRPLIET
NGETGEIVWDKGRDFATVRKVLSMPQVNIVKKTEVQTGGFSKESILPKRNSDKLIAR
KKDWDPKKYGGFDSPTVAYSVLVVAKVEKGKSKKLKSVKELLGITIMERSSFEKNPI
DFLEAKGYKEVKKDLIIKLPKYSLFELENGRKRMLASAGELQKGNELALPSKYVNFL
YLASHYEKLKGSPEDNEQKQLFVEQHKHYLDEIIEQISEFSKRVILADANLDKVLSAY
NKHRDKPIREQAENIIHLFTLTNLGAPAAFKYFDTTIDRKRYTSTKEVLDATLIHQSIT
GLYETRIDLSQLGGDGGSGGSGGSGGSGGSGGSGGMDKKYSIGLAIGTNSVGWAVIT
DEYKVPSKKFKVLGNTDRHSIKKNLIGALLFDSGETAEATRLKRTARRRYTRRKNRI
CYLQEIFSNEMAKVDDSFFHRLEESFLVEEDKKHERHPIFGNIVDEVAYHEKYPTIYH
LRKKLVDSTDKADLRLIYLALAHMIKFRGHFLIEGDLNPDNSDVDKLFIQLVQTYNQ
LFEENPINASGVDAKAILSARLSKSRRLENLIAQLPGEKKNGLFGNLIALSLGLTPNFK
SNFDLAEDAKLQLSKDTYDDDLDNLLAQIGDQYADLFLAAKNLSDAILLSDILRVNT
EITKAPLSASMIKRYDEHHQDLTLLKALVRQQLPEKYKEIFFDQSKNGYAGYIDGGA
SQEEFYKFIKPILEKMDGTEELLVKLNREDLLRKQRTFDNGSIPHQIHLGELHAILRRQ
EDFYPFLKDNREKIEKILTFRIPYYVGPLARGNSRFAWMTRKSEETITPWNFEEVVDK
GASAQSFIERMTNFDKNLPNEKVLPKHSLLYEYFTVYNELTKVKYVTEGMRKPAFLS
GEQKKAIVDLLFKTNRKVTVKQLKEDYFKKIECFDSVEISGVEDRFNASLGTYHDLL
KIIKDKDFLDNEENEDILEDIVLTLTLFEDREMIEERLKTYAHLFDDKVMKQLKRRRY
TGWGRLSRKLINGIRDKQSGKTILDFLKSDGFANRNFMQLIHDDSLTFKEDIQKAQVS
GQGDSLHEHIANLAGSPAIKKGILQTVKVVDELVKVMGRHKPENIVIEMARENQTTQ
KGQKNSRERMKRIEEGIKELGSQILKEHPVENTQLQNEKLYLYYLQNGRDMYVDQE
LDINRLSDYDVDHIVPQSFLKDDSIDNKVLTRSDKNRGKSDNVPSEEVVKKMKNYW
RQLLNAKLITQRKFDNLTKAERGGLSELDKAGFIKRQLVETRQITKHVAQILDSRMN
TKYDENDKLIREVKVITLKSKLVSDFRKDFQFYKVREINNYHHAHDAYLNAVVGTA
LIKKYPKLESEFVYGDYKVYDVRKMIAKSEQSGGSKRTADGSEFEPKKKRKV
CP1041-ABE8e
(SEQ ID NO: 390)
MKRTADGSEFESPKKKRKVSEVEFSHEYWMRHALTLAKRARDEREVPVGAVLVLN
NRVIGEGWNRAIGLHDPTAHAEIMALRQGGLVMQNYRLIDATLYVTFEPCVMCAGA
MIHSRIGRVVFGVRNSKRGAAGSLMNVLNYPGMNHRVEITEGILADECAALLCDFY
RMPRQVFNAQKKAQSSINSGGSSGGSSGSETPGTSESATPESSGGSSGGSNIMNFFKT
EITLANGEIRKRPLIETNGETGEIVWDKGRDFATVRKVLSMPQVNIVKKTEVQTGGFS
KESILPKRNSDKLIARKKDWDPKKYGGFDSPTVAYSVLVVAKVEKGKSKKLKSVKE
LLGITIMERSSFEKNPIDFLEAKGYKEVKKDLIIKLPKYSLFELENGRKRMLASAGELQ
KGNELALPSKYVNFLYLASHYEKLKGSPEDNEQKQLFVEQHKHYLDEIIEQISEFSKR
VILADANLDKVLSAYNKHRDKPIREQAENIIHLFTLTNLGAPAAFKYFDTTIDRKRYT
STKEVLDATLIHQSITGLYETRIDLSQLGGDGGSGGSGGSGGSGGSGGSGGDKKYSIG
LAIGTNSVGWAVITDEYKVPSKKFKVLGNTDRHSIKKNLIGALLFDSGETAEATRLK
RTARRRYTRRKNRICYLQEIFSNEMAKVDDSFFHRLEESFLVEEDKKHERHPIFGNIV
DEVAYHEKYPTIYHLRKKLVDSTDKADLRLIYLALAHMIKFRGHFLIEGDLNPDNSD
VDKLFIQLVQTYNQLFEENPINASGVDAKAILSARLSKSRRLENLIAQLPGEKKNGLF
GNLIALSLGLTPNFKSNFDLAEDAKLQLSKDTYDDDLDNLLAQIGDQYADLFLAAKN
LSDAILLSDILRVNTEITKAPLSASMIKRYDEHHQDLTLLKALVRQQLPEKYKEIFFDQ
SKNGYAGYIDGGASQEEFYKFIKPILEKMDGTEELLVKLNREDLLRKQRTFDNGSIPH
QIHLGELHAILRRQEDFYPFLKDNREKIEKILTFRIPYYVGPLARGNSRFAWMTRKSEE
TITPWNFEEVVDKGASAQSFIERMTNFDKNLPNEKVLPKHSLLYEYFTVYNELTKVK
YVTEGMRKPAFLSGEQKKAIVDLLFKTNRKVTVKQLKEDYFKKIECFDSVEISGVED
RFNASLGTYHDLLKIIKDKDFLDNEENEDILEDIVLTLTLFEDREMIEERLKTYAHLFD
DKVMKQLKRRRYTGWGRLSRKLINGIRDKQSGKTILDFLKSDGFANRNFMQLIHDD
SLTFKEDIQKAQVSGQGDSLHEHIANLAGSPAIKKGILQTVKVVDELVKVMGRHKPE
NIVIEMARENQTTQKGQKNSRERMKRIEEGIKELGSQILKEHPVENTQLQNEKLYLY
YLQNGRDMYVDQELDINRLSDYDVDHIVPQSFLKDDSIDNKVLTRSDKNRGKSDNV
PSEEVVKKMKNYWRQLLNAKLITQRKFDNLTKAERGGLSELDKAGFIKRQLVETRQI
TKHVAQILDSRMNTKYDENDKLIREVKVITLKSKLVSDFRKDFQFYKVREINNYHHA
HDAYLNAVVGTALIKKYPKLESEFVYGDYKVYDVRKMIAKSEQEIGKATAKYFFYS
SGGSKRTADGSEFEPKKKRKV
ABE8e(TadA-8e V82G)
(SEQ ID NO: 376)
MKRTADGSEFESPKKKRKVSEVEFSHEYWMRHALTLAKRARDEREVPVGAVLVLN
NRVIGEGWNRAIGLHDPTAHAEIMALRQGGLVMQNYRLIDATLYVTFEPCVMCAGA
MIHSRIGRVVFGVRNSKRGAAGSLMNVLNYPGMNHRVEITEGILADECAALLCDFY
RMPRQVFNAQKKAQSSINSGGSSGGSSGSETPGTSESATPESSGGSSGGSDKKYSIGL
AIGTNSVGWAVITDEYKVPSKKFKVLGNTDRHSIKKNLIGALLFDSGETAEATRLKR
TARRRYTRRKNRICYLQEIFSNEMAKVDDSFFHRLEESFLVEEDKKHERHPIFGNIVD
EVAYHEKYPTIYHLRKKLVDSTDKADLRLIYLALAHMIKFRGHFLIEGDLNPDNSDV
DKLFIQLVQTYNQLFEENPINASGVDAKAILSARLSKSRRLENLIAQLPGEKKNGLFG
NLIALSLGLTPNFKSNFDLAEDAKLQLSKDTYDDDLDNLLAQIGDQYADLFLAAKNL
SDAILLSDILRVNTEITKAPLSASMIKRYDEHHQDLTLLKALVRQQLPEKYKEIFFDQS
KNGYAGYIDGGASQEEFYKFIKPILEKMDGTEELLVKLNREDLLRKQRTFDNGSIPHQ
IHLGELHAILRRQEDFYPFLKDNREKIEKILTFRIPYYVGPLARGNSRFAWMTRKSEET
ITPWNFEEVVDKGASAQSFIERMTNFDKNLPNEKVLPKHSLLYEYFTVYNELTKVKY
VTEGMRKPAFLSGEQKKAIVDLLFKTNRKVTVKQLKEDYFKKIECFDSVEISGVEDR
FNASLGTYHDLLKIIKDKDFLDNEENEDILEDIVLTLTLFEDREMIEERLKTYAHLFDD
KVMKQLKRRRYTGWGRLSRKLINGIRDKQSGKTILDFLKSDGFANRNFMQLIHDDSL
TFKEDIQKAQVSGQGDSLHEHIANLAGSPAIKKGILQTVKVVDELVKVMGRHKPENI
VIEMARENQTTQKGQKNSRERMKRIEEGIKELGSQILKEHPVENTQLQNEKLYLYYL
QNGRDMYVDQELDINRLSDYDVDHIVPQSFLKDDSIDNKVLTRSDKNRGKSDNVPS
EEVVKKMKNYWRQLLNAKLITQRKFDNLTKAERGGLSELDKAGFIKRQLVETRQIT
KHVAQILDSRMNTKYDENDKLIREVKVITLKSKLVSDFRKDFQFYKVREINNYHHAH
DAYLNAVVGTALIKKYPKLESEFVYGDYKVYDVRKMIAKSEQEIGKATAKYFFYSNI
MNFFKTEITLANGEIRKRPLIETNGETGEIVWDKGRDFATVRKVLSMPQVNIVKKTEV
QTGGFSKESILPKRNSDKLIARKKDWDPKKYGGFDSPTVAYSVLVVAKVEKGKSKK
LKSVKELLGITIMERSSFEKNPIDFLEAKGYKEVKKDLIIKLPKYSLFELENGRKRMLA
SAGELQKGNELALPSKYVNFLYLASHYEKLKGSPEDNEQKQLFVEQHKHYLDEIIEQI
SEFSKRVILADANLDKVLSAYNKHRDKPIREQAENIIHLFTLTNLGAPAAFKYFDTTID
RKRYTSTKEVLDATLIHQSITGLYETRIDLSQLGGDSGGSKRTADGSEFEPKKKRKV
ABE8e(TadA-8e K20AR21A)
(SEQ ID NO: 376)
MKRTADGSEFESPKKKRKVSEVEFSHEYWMRHALTLAKRARDEREVPVGAVLVLN
NRVIGEGWNRAIGLHDPTAHAEIMALRQGGLVMQNYRLIDATLYVTFEPCVMCAGA
MIHSRIGRVVFGVRNSKRGAAGSLMNVLNYPGMNHRVEITEGILADECAALLCDFY
RMPRQVFNAQKKAQSSINSGGSSGGSSGSETPGTSESATPESSGGSSGGSDKKYSIGL
AIGTNSVGWAVITDEYKVPSKKFKVLGNTDRHSIKKNLIGALLFDSGETAEATRLKR
TARRRYTRRKNRICYLQEIFSNEMAKVDDSFFHRLEESFLVEEDKKHERHPIFGNIVD
EVAYHEKYPTIYHLRKKLVDSTDKADLRLIYLALAHMIKFRGHFLIEGDLNPDNSDV
DKLFIQLVQTYNQLFEENPINASGVDAKAILSARLSKSRRLENLIAQLPGEKKNGLFG
NLIALSLGLTPNFKSNFDLAEDAKLQLSKDTYDDDLDNLLAQIGDQYADLFLAAKNL
SDAILLSDILRVNTEITKAPLSASMIKRYDEHHQDLTLLKALVRQQLPEKYKEIFFDQS
KNGYAGYIDGGASQEEFYKFIKPILEKMDGTEELLVKLNREDLLRKQRTFDNGSIPHQ
IHLGELHAILRRQEDFYPFLKDNREKIEKILTFRIPYYVGPLARGNSRFAWMTRKSEET
ITPWNFEEVVDKGASAQSFIERMTNFDKNLPNEKVLPKHSLLYEYFTVYNELTKVKY
VTEGMRKPAFLSGEQKKAIVDLLFKTNRKVTVKQLKEDYFKKIECFDSVEISGVEDR
FNASLGTYHDLLKIIKDKDFLDNEENEDILEDIVLTLTLFEDREMIEERLKTYAHLFDD
KVMKQLKRRRYTGWGRLSRKLINGIRDKQSGKTILDFLKSDGFANRNFMQLIHDDSL
TFKEDIQKAQVSGQGDSLHEHIANLAGSPAIKKGILQTVKVVDELVKVMGRHKPENI
VIEMARENQTTQKGQKNSRERMKRIEEGIKELGSQILKEHPVENTQLQNEKLYLYYL
QNGRDMYVDQELDINRLSDYDVDHIVPQSFLKDDSIDNKVLTRSDKNRGKSDNVPS
EEVVKKMKNYWRQLLNAKLITQRKFDNLTKAERGGLSELDKAGFIKRQLVETRQIT
KHVAQILDSRMNTKYDENDKLIREVKVITLKSKLVSDFRKDFQFYKVREINNYHHAH
DAYLNAVVGTALIKKYPKLESEFVYGDYKVYDVRKMIAKSEQEIGKATAKYFFYSNI
MNFFKTEITLANGEIRKRPLIETNGETGEIVWDKGRDFATVRKVLSMPQVNIVKKTEV
QTGGFSKESILPKRNSDKLIARKKDWDPKKYGGFDSPTVAYSVLVVAKVEKGKSKK
LKSVKELLGITIMERSSFEKNPIDFLEAKGYKEVKKDLIIKLPKYSLFELENGRKRMLA
SAGELQKGNELALPSKYVNFLYLASHYEKLKGSPEDNEQKQLFVEQHKHYLDEIIEQI
SEFSKRVILADANLDKVLSAYNKHRDKPIREQAENIIHLFTLTNLGAPAAFKYFDTTID
RKRYTSTKEVLDATLIHQSITGLYETRIDLSQLGGDSGGSKRTADGSEFEPKKKRKV
ABE8e(TadA-8e V106W)
(SEQ ID NO: 391)
MKRTADGSEFESPKKKRKVSEVEFSHEYWMRHALTLAKRARDEREVPVGAVLVLN
NRVIGEGWNRAIGLHDPTAHAEIMALRQGGLVMQNYRLIDATLYVTFEPCVMCAGA
MIHSRIGRVVFGWRNSKRGAAGSLMNVLNYPGMNHRVEITEGILADECAALLCDFY
RMPRQVFNAQKKAQSSINSGGSSGGSSGSETPGTSESATPESSGGSSGGSDKKYSIGL
AIGTNSVGWAVITDEYKVPSKKFKVLGNTDRHSIKKNLIGALLFDSGETAEATRLKR
TARRRYTRRKNRICYLQEIFSNEMAKVDDSFFHRLEESFLVEEDKKHERHPIFGNIVD
EVAYHEKYPTIYHLRKKLVDSTDKADLRLIYLALAHMIKFRGHFLIEGDLNPDNSDV
DKLFIQLVQTYNQLFEENPINASGVDAKAILSARLSKSRRLENLIAQLPGEKKNGLFG
NLIALSLGLTPNFKSNFDLAEDAKLQLSKDTYDDDLDNLLAQIGDQYADLFLAAKNL
SDAILLSDILRVNTEITKAPLSASMIKRYDEHHQDLTLLKALVRQQLPEKYKEIFFDQS
KNGYAGYIDGGASQEEFYKFIKPILEKMDGTEELLVKLNREDLLRKQRTFDNGSIPHQ
IHLGELHAILRRQEDFYPFLKDNREKIEKILTFRIPYYVGPLARGNSRFAWMTRKSEET
ITPWNFEEVVDKGASAQSFIERMTNFDKNLPNEKVLPKHSLLYEYFTVYNELTKVKY
VTEGMRKPAFLSGEQKKAIVDLLFKTNRKVTVKQLKEDYFKKIECFDSVEISGVEDR
FNASLGTYHDLLKIIKDKDFLDNEENEDILEDIVLTLTLFEDREMIEERLKTYAHLFDD
KVMKQLKRRRYTGWGRLSRKLINGIRDKQSGKTILDFLKSDGFANRNFMQLIHDDSL
TFKEDIQKAQVSGQGDSLHEHIANLAGSPAIKKGILQTVKVVDELVKVMGRHKPENI
VIEMARENQTTQKGQKNSRERMKRIEEGIKELGSQILKEHPVENTQLQNEKLYLYYL
QNGRDMYVDQELDINRLSDYDVDHIVPQSFLKDDSIDNKVLTRSDKNRGKSDNVPS
EEVVKKMKNYWRQLLNAKLITQRKFDNLTKAERGGLSELDKAGFIKRQLVETRQIT
KHVAQILDSRMNTKYDENDKLIREVKVITLKSKLVSDFRKDFQFYKVREINNYHHAH
DAYLNAVVGTALIKKYPKLESEFVYGDYKVYDVRKMIAKSEQEIGKATAKYFFYSNI
MNFFKTEITLANGEIRKRPLIETNGETGEIVWDKGRDFATVRKVLSMPQVNIVKKTEV
QTGGFSKESILPKRNSDKLIARKKDWDPKKYGGFDSPTVAYSVLVVAKVEKGKSKK
LKSVKELLGITIMERSSFEKNPIDFLEAKGYKEVKKDLIIKLPKYSLFELENGRKRMLA
SAGELQKGNELALPSKYVNFLYLASHYEKLKGSPEDNEQKQLFVEQHKHYLDEIIEQI
SEFSKRVILADANLDKVLSAYNKHRDKPIREQAENIIHLFTLTNLGAPAAFKYFDTTID
RKRYTSTKEVLDATLIHQSITGLYETRIDLSQLGGDSGGSKRTADGSEFEPKKKRKV
ABE8e-NRTH dimer editor: NLS, wtTadA, linker, TadA*, SpCas9-NRTH
(SEQ ID NO: 392)
MKRTADGSEFESPKKKRKVSEVEFSHEYWMRHALTLAKRAWDEREVPVGAVLVHN
NRVIGEGWNRPIGRHDPTAHAEIMALRQGGLVMQNYRLIDATLYVTLEPCVMCAGA
MIHSRIGRVVFGARDAKTGAAGSLMDVLHHPGMNHRVEITEGILADECAALLSDFFR
MRRQEIKAQKKAQSSTDSGGSSGGSSGSETPGTSESATPESSGGSSGGSSEVEFSHEY
WMRHALTLAKRARDEREVPVGAVLVLNNRVIGEGWNRAIGLHDPTAHAEIMALRQ
GGLVMQNYRLIDATLYVTFEPCVMCAGAMIHSRIGRVVFGVRNSKRGAAGSLMNV
LNYPGMNHRVEITEGILADECAALLCDFYRMPRQVFNAQKKAQSSINSGGSSGGSSG
SETPGTSESATPESSGGSSGGSDKKYSIGLAIGTNSVGWAVITDEYKVPSKKFKVLGN
TDRHSIKKNLIGALLFDSGETAEATRLKRTARRRYTRRKNRICYLQEIFSNEMAKVDD
SFFHRLEESFLVEEDKKHERHPIFGNIVDEVAYHEKYPTIYHLRKKLVDSTDKADLRL
IYLALAHMIKFRGHFLIEGDLNPDNSDVDKLFIQLVQTYNQLFEENPINASGVDAKAI
LSARLSKSRRLENLIAQLPGEKKNGLFGNLIALSLGLTPNFKSNFDLAEDAKLQLSKD
TYDDDLDNLLAQIGDQYADLFLAAKNLSDAILLSDILRVNTEITKAPLSASMVKRYD
EHHQDLTLLKALVRQQLPEKYKEIFFDQSKNGYAGYIDGGASQEEFYKFIKPILEKM
DGTEELLVKLNREDLLRKQRTFDNGIIPHQIHLGELHAILRRQGDFYPFLKDNREKIEK
ILTFRIPYYVGPLARGNSRFAWMTRKSEETITPWNFEEVVDKGASAQSFIERMTNFDK
NLPNEKVLPKHSLLYEYFTVYNELTKVKYVTEGMRKPAFLSGEQKKAIVDLLFKTNR
KVTVKQLKEDYFKKIECFDSVEISGVEDRFNASLGTYHDLLKIIKDKDFLDNEENEDI
LEDIVLTLTLFEDREMIEERLKTYAHLFDDKVMKQLKRLRYTGWGRLSRKLINGIRD
KQSGKTILDFLKSDGFANRNFMQLIHDDSLTFKEDIQKAQVSCQGDSLHEHIANLAGS
PAIKKGILQTVKVVDELIKVMGGHKPENIVIEMARENQTTQKGQKNSRERMKRIEEGI
KELGSQILKEHPVENTQLQNEKLYLYYLQNGRDMYVDQELDINRLSDYDVDHIVPQ
SFLKDDSIENKVLTRSDKNRGKSDNVPSEEVVKKMKNYWRQLLNAKLITQRKFDNL
TKAERGGLSELDKAGFIKRQLAETRQITKHVAQILDSRMNTKYDENDKLIREVKVITL
KSKLVSDFRKDFQFYKVREINNYHHAHDAYLNAVVGTALIKKYPKLESEFVYGDYK
VYDVRKMIAKSEQEIGKATAKYFFYSNIMNFFKTEITLANGEIRKRPLIETNGETGEIV
WDKGRDFATVRKVLSMPQVNIVKKTEVQTGGFSKESILPKGNSDKLIARKKDWDPK
KYGGFNSPTVAYSVLVVAKVEKGKSKKLKSVKELLGITIMERSSFEKNPIGFLEAKG
YKEVKKDLIIKLPKYSLFELENGRKRMLASASVLHKGNELALPSKYVNFLYLASHYE
KLKGSSEDNKQKQLFVEQHKHYLDEIIEQISEFSKRVILADANLDKVLSAYNKHRDK
PIREQAENIIHLFTLTNLGASAAFKYFDTTIGRKLYTSTKEVLDATLIHQSrrGLYETRI
DLSQLGGDSGGSKRTADGSEFEPKKKRKV
ABE8e-NRTH monomer editor: NLS, linker, TadA*, SpCas9-NRTH
(SEQ ID NO: 393)
MKRTADGSEFESPKKKRKVSEVEFSHEYWMRHALTLAKRARDEREVPVGAVLVLN
NRVIGEGWNRAIGLHDPTAHAEIMALRQGGLVMQNYRLIDATLYVTFEPCVMCAGA
MIHSRIGRVVFGVRNSKRGAAGSLMNVLNYPGMNHRVEITEGILADECAALLCDFY
RMPRQVFNAQKKAQSSINSGGSSGGSSGSETPGTSESATPESSGGSSGGSDKKYSIGL
AIGTNSVGWAVITDEYKVPSKKFKVLGNTDRHSIKKNLIGALLFDSGETAEATRLKR
TARRRYTRRKNRICYLQEIFSNEMAKVDDSFFHRLEESFLVEEDKKHERHPIFGNIVD
EVAYHEKYPTIYHLRKKLVDSTDKADLRLIYLALAHMIKFRGHFLIEGDLNPDNSDV
DKLFIQLVQTYNQLFEENPINASGVDAKAILSARLSKSRRLENLIAQLPGEKKNGLFG
NLIALSLGLTPNFKSNFDLAEDAKLQLSKDTYDDDLDNLLAQIGDQYADLFLAAKNL
SDAILLSDILRVNTEITKAPLSASMVKRYDEHHQDLTLLKALVRQQLPEKYKEIFFDQ
SKNGYAGYIDGGASQEEFYKFIKPILEKMDGTEELLVKLNREDLLRKQRTFDNGIIPH
QIHLGELHAILRRQGDFYPFLKDNREKIEKILTFRIPYYVGPLARGNSRFAWMTRKSE
ETITPWNFEEVVDKGASAQSFIERMTNFDKNLPNEKVLPKHSLLYEYFTVYNELTKV
KYVTEGMRKPAFLSGEQKKAIVDLLFKTNRKVTVKQLKEDYFKKIECFDSVEISGVE
DRFNASLGTYHDLLKIIKDKDFLDNEENEDILEDIVLTLTLFEDREMIEERLKTYAHLF
DDKVMKQLKRLRYTGWGRLSRKLINGIRDKQSGKTILDFLKSDGFANRNFMQLIHD
DSLTFKEDIQKAQVSCQGDSLHEHIANLAGSPAIKKGILQTVKVVDELIKVMGGHKP
ENIVIEMARENQTTQKGQKNSRERMKRIEEGIKELGSQILKEHPVENTQLQNEKLYLY
YLQNGRDMYVDQELDINRLSDYDVDHIVPQSFLKDDSIENKVLTRSDKNRGKSDNV
PSEEVVKKMKNYWRQLLNAKLITQRKFDNLTKAERGGLSELDKAGFIKRQLAETRQI
TKHVAQILDSRMNTKYDENDKLIREVKVITLKSKLVSDFRKDFQFYKVREINNYHHA
HDAYLNAVVGTALIKKYPKLESEFVYGDYKVYDVRKMIAKSEQEIGKATAKYFFYS
NIMNFFKTEITLANGEIRKRPLIETNGETGEIVWDKGRDFATVRKVLSMPQVNIVKKT
EVQTGGFSKESILPKGNSDKLIARKKDWDPKKYGGFNSPTVAYSVLVVAKVEKGKS
KKLKSVKELLGITIMERSSFEKNPIGFLEAKGYKEVKKDLIIKLPKYSLFELENGRKRM
LASASVLHKGNELALPSKYVNFLYLASHYEKLKGSSEDNKQKQLFVEQHKHYLDEII
EQISEFSKRVILADANLDKVLSAYNKHRDKPIREQAENIIHLFTLTNLGASAAFKYFDT
TIGRKLYTSTKEVLDATLIHQSITGLYETRIDLSQLGGDSGGSKRTADGSEFEPKKKRK
V
ABESe-SpyMac dimer editor: NLS, wtTadA, linker, TadA*, SpCas9-SpyMac
(SEQ ID NO: 394)
MKRTADGSEFESPKKKRKVSEVEFSHEYWMRHALTLAKRAWDEREVPVGAVLVHN
NRVIGEGWNRPIGRHDPTAHAEIMALRQGGLVMQNYRLIDATLYVTLEPCVMCAGA
MIHSRIGRVVFGARDAKTGAAGSLMDVLHHPGMNHRVEITEGILADECAALLSDFFR
MRRQEIKAQKKAQSSTDSGGSSGGSSGSETPGTSESATPESSGGSSGGSSEVEFSHEY
WMRHALTLAKRARDEREVPVGAVLVLNNRVIGEGWNRAIGLHDPTAHAEIMALRQ
GGLVMQNYRLIDATLYVTFEPCVMCAGAMIHSRIGRVVFGVRNSKRGAAGSLMNV
LNYPGMNHRVEITEGILADECAALLCDFYRMPRQVFNAQKKAQSSINSGGSSGGSSG
SETPGTSESATPESSGGSSGGSDKKYSIGLAIGTNSVGWAVITDEYKVPSKKFKVLGN
TDRHSIKKNLIGALLFDSGETAEATRLKRTARRRYTRRKNRICYLQEIFSNEMAKVDD
SFFHRLEESFLVEEDKKHERHPIFGNIVDEVAYHEKYPTIYHLRKKLVDSTDKADLRL
IYLALAHMIKFRGHFLIEGDLNPDNSDVDKLFIQLVQTYNQLFEENPINASGVDAKAI
LSARLSKSRRLENLIAQLPGEKKNGLFGNLIALSLGLTPNFKSNFDLAEDAKLQLSKD
TYDDDLDNLLAQIGDQYADLFLAAKNLSDAILLSDILRVNTEITKAPLSASMIKRYDE
HHQDLTLLKALVRQQLPEKYKEIFFDQSKNGYAGYIDGGASQEEFYKFIKPILEKMD
GTEELLVKLNREDLLRKQRTFDNGSIPHQIHLGELHAILRRQEDFYPFLKDNREKIEKI
LTFRIPYYVGPLARGNSRFAWMTRKSEETITPWNFEEVVDKGASAQSFIERMTNFDK
NLPNEKVLPKHSLLYEYFTVYNELTKVKYVTEGMRKPAFLSGEQKKAIVDLLFKTNR
KVTVKQLKEDYFKKIECFDSVEISGVEDRFNASLGTYHDLLKIIKDKDFLDNEENEDI
LEDIVLTLTLFEDREMIEERLKTYAHLFDDKVMKQLKRRRYTGWGRLSRKLINGIRD
KQSGKTILDFLKSDGFANRNFMQLIHDDSLTFKEDIQKAQVSGQGDSLHEHIANLAG
SPAIKKGILQTVKVVDELVKVMGRHKPENIVIEMARENQTTQKGQKNSRERMKRIEE
GIKELGSQILKEHPVENTQLQNEKLYLYYLQNGRDMYVDQELDINRLSDYDVDHIVP
QSFLKDDSIDNKVLTRSDKNRGKSDNVPSEEVVKKMKNYWRQLLNAKLITQRKFDN
LTKAERGGLSELDKAGFIKRQLVETRQITKHVAQILDSRMNTKYDENDKLIREVKVIT
LKSKLVSDFRKDFQFYKVREINNYHHAHDAYLNAVVGTALIKKYPKLESEFVYGDY
KVYDVRKMIAKSEQEIGKATAKYFFYSNIMNFFKTEITLANGEIRKRPLIETNGETGEI
VWDKGRDFATVRKVLSMPQVNIVKKTEIQTVGQNGGLFDDNPKSPLEVTPSKLVPL
KKELNPKKYGGYQKPTTAYPVLLITDTKQLIPISVMNKKQFEQNPVKFLRDRGYQQV
GKNDFIKLPKYTLVDIGDGIKRLWASSKEIHKGNQLVVSKKSQILLYHAHHLDSDLS
NDYLQNHNQQFDVLFNEIISFSKKCKLGKEHIQKIENVYSNKKNSASIEELAESFIKLL
GFTQLGATSPFNFLGVKLNQKQYKGKKDYILPCTEGTLIRQSITGLYETRVDLSKIGE
DSGGSKRTADGSEFEPKKKRKV
ABESe-SpyMac monomer editor: NLS, wtTadA, linker, TadA*, SpCas9-SpyMac
(SEQ ID NO: 395)
MKRTADGSEFESPKKKRKVSEVEFSHEYWMRHALTLAKRARDEREVPVGAVLVLN
NRVIGEGWNRAIGLHDPTAHAEIMALRQGGLVMQNYRLIDATLYVTFEPCVMCAGA
MIHSRIGRVVFGVRNSKRGAAGSLMNVLNYPGMNHRVEITEGILADECAALLCDFY
RMPRQVFNAQKKAQSSINSGGSSGGSSGSETPGTSESATPESSGGSSGGSDKKYSIGL
AIGTNSVGWAVITDEYKVPSKKFKVLGNTDRHSIKKNLIGALLFDSGETAEATRLKR
TARRRYTRRKNRICYLQEIFSNEMAKVDDSFFHRLEESFLVEEDKKHERHPIFGNIVD
EVAYHEKYPTIYHLRKKLVDSTDKADLRLIYLALAHMIKFRGHFLIEGDLNPDNSDV
DKLFIQLVQTYNQLFEENPINASGVDAKAILSARLSKSRRLENLIAQLPGEKKNGLFG
NLIALSLGLTPNFKSNFDLAEDAKLQLSKDTYDDDLDNLLAQIGDQYADLFLAAKNL
SDAILLSDILRVNTEITKAPLSASMIKRYDEHHQDLTLLKALVRQQLPEKYKEIFFDQS
KNGYAGYIDGGASQEEFYKFIKPILEKMDGTEELLVKLNREDLLRKQRTFDNGSIPHQ
IHLGELHAILRRQEDFYPFLKDNREKIEKILTFRIPYYVGPLARGNSRFAWMTRKSEET
ITPWNFEEVVDKGASAQSFIERMTNFDKNLPNEKVLPKHSLLYEYFTVYNELTKVKY
VTEGMRKPAFLSGEQKKAIVDLLFKTNRKVTVKQLKEDYFKKIECFDSVEISGVEDR
FNASLGTYHDLLKIIKDKDFLDNEENEDILEDIVLTLTLFEDREMIEERLKTYAHLFDD
KVMKQLKRRRYTGWGRLSRKLINGIRDKQSGKTILDFLKSDGFANRNFMQLIHDDSL
TFKEDIQKAQVSGQGDSLHEHIANLAGSPAIKKGILQTVKVVDELVKVMGRHKPENI
VIEMARENQTTQKGQKNSRERMKRIEEGIKELGSQILKEHPVENTQLQNEKLYLYYL
QNGRDMYVDQELDINRLSDYDVDHIVPQSFLKDDSIDNKVLTRSDKNRGKSDNVPS
EEVVKKMKNYWRQLLNAKLITQRKFDNLTKAERGGLSELDKAGFIKRQLVETRQIT
KHVAQILDSRMNTKYDENDKLIREVKVITLKSKLVSDFRKDFQFYKVREINNYHHAH
DAYLNAVVGTALIKKYPKLESEFVYGDYKVYDVRKMIAKSEQEIGKATAKYFFYSNI
MNFFKTEITLANGEIRKRPLIETNGETGEIVWDKGRDFATVRKVLSMPQVNIVKKTEI
QTVGQNGGLFDDNPKSPLEVTPSKLVPLKKELNPKKYGGYQKPTTAYPVLLITDTKQ
LIPISVMNKKQFEQNPVKFLRDRGYQQVGKNDFIKLPKYTLVDIGDGIKRLWASSKEI
HKGNQLVVSKKSQILLYHAHHLDSDLSNDYLQNHNQQFDVLFNEIISFSKKCKLGKE
HIQKIENVYSNKKNSASIEELAESFIKLLGFTQLGATSPFNFLGVKLNQKQYKGKKDY
ILPCTEGTLIRQSITGLYETRVDLSKIGEDSGGSKRTADGSEFEPKKKRKV
ABE8e-VRQR-CP1041 dimer: NLS, wtTadA, linker, TadA*, SpCas9-VRQR-CP1041
(SEQ ID NO: 396)
MKRTADGSEFESPKKKRKVSEVEFSHEYWMRHALTLAKRAWDEREVPVGAVLVHN
NRVIGEGWNRPIGRHDPTAHAEIMALRQGGLVMQNYRLIDATLYVTLEPCVMCAGA
MIHSRIGRVVFGARDAKTGAAGSLMDVLHHPGMNHRVEITEGILADECAALLSDFFR
MRRQEIKAQKKAQSSTDSGGSSGGSSGSETPGTSESATPESSGGSSGGSSEVEFSHEY
WMRHALTLAKRARDEREVPVGAVLVLNNRVIGEGWNRAIGLHDPTAHAEIMALRQ
GGLVMQNYRLIDATLYVTFEPCVMCAGAMIHSRIGRVVFGVRNSKRGAAGSLMNV
LNYPGMNHRVEITEGILADECAALLCDFYRMPRQVFNAQKKAQSSINSGGSSGGSSG
SETPGTSESATPESSGGSSGGSNIMNFFKTEITLANGEIRKRPLIETNGETGEIVWDKGR
DFATVRKVLSMPQVNIVKKTEVQTGGFSKESIRPKRNSDKLIARKKDWDPKKYGGF
VSPTVAYSVLVVAKVEKGKSKKLKSVKELLGITIMERSSFEKNPIDFLEAKGYKEVK
KDLIIKLPKYSLFELENGRKRMLASARFLQKGNELALPSKYVNFLYLASHYEKLKGS
PEDNEQKQLFVEQHKHYLDEIIEQISEFSKRVILADANLDKVLSAYNKHRDKPIREQA
ENIIHLFTLTNLGAPRAFKYFDTTIDRKVYRSTKEVLDATLIHQSITGLYETRIDLSQLG
GDGGSGGSGGSGGSGGSGGSGGDKKYSIGLAIGTNSVGWAVITDEYKVPSKKFKVL
GNTDRHSIKKNLIGALLFDSGETAEATRLKRTARRRYTRRKNRICYLQEIFSNEMAKV
DDSFFHRLEESFLVEEDKKHERHPIFGNIVDEVAYHEKYPTIYHLRKKLVDSTDKADL
RLIYLALAHMIKFRGHFLIEGDLNPDNSDVDKLFIQLVQTYNQLFEENPINASGVDAK
AILSARLSKSRRLENLIAQLPGEKKNGLFGNLIALSLGLTPNFKSNFDLAEDAKLQLSK
DTYDDDLDNLLAQIGDQYADLFLAAKNLSDAILLSDILRVNTEITKAPLSASMIKRYD
EHHQDLTLLKALVRQQLPEKYKEIFFDQSKNGYAGYIDGGASQEEFYKFIKPILEKM
DGTEELLVKLNREDLLRKQRTFDNGSIPHQIHLGELHAILRRQEDFYPFLKDNREKIE
KILTFRIPYYVGPLARGNSRFAWMTRKSEETITPWNFEEVVDKGASAQSFIERMTNFD
KNLPNEKVLPKHSLLYEYFTVYNELTKVKYVTEGMRKPAFLSGEQKKAIVDLLFKT
NRKVTVKQLKEDYFKKIECFDSVEISGVEDRFNASLGTYHDLLKIIKDKDFLDNEENE
DILEDIVLTLTLFEDREMIEERLKTYAHLFDDKVMKQLKRRRYTGWGRLSRKLINGIR
DKQSGKTILDFLKSDGFANRNFMQLIHDDSLTFKEDIQKAQVSGQGDSLHEHIANLA
GSPAIKKGILQTVKVVDELVKVMGRHKPENIVIEMARENQTTQKGQKNSRERMKRIE
EGIKELGSQILKEHPVENTQLQNEKLYLYYLQNGRDMYVDQELDINRLSDYDVDHIV
PQSFLKDDSIDNKVLTRSDKNRGKSDNVPSEEVVKKMKNYWRQLLNAKLITQRKFD
NLTKAERGGLSELDKAGFIKRQLVETRQITKHVAQILDSRMNTKYDENDKLIREVKV
ITLKSKLVSDFRKDFQFYKVREINNYHHAHDAYLNAVVGTALIKKYPKLESEFVYGD
YKVYDVRKMIAKSEQEIGKATAKYFFYSSGGSKRTADGSEFEPKKKRKV
ABE8e-VRQR-CP1041 monomer: NLS, linker, TadA*, SpCas9-VRQR-CP1041
(SEQ ID NO: 397)
MKRTADGSEFESPKKKRKVSEVEFSHEYWMRHALTLAKRARDEREVPVGAVLVLN
NRVIGEGWNRAIGLHDPTAHAEIMALRQGGLVMQNYRLIDATLYVTFEPCVMCAGA
MIHSRIGRVVFGVRNSKRGAAGSLMNVLNYPGMNHRVEITEGILADECAALLCDFY
RMPRQVFNAQKKAQSSINSGGSSGGSSGSETPGTSESATPESSGGSSGGSNIMNFFKT
EITLANGEIRKRPLIETNGETGEIVWDKGRDFATVRKVLSMPQVNIVKKTEVQTGGFS
KESIRPKRNSDKLIARKKDWDPKKYGGFVSPTVAYSVLVVAKVEKGKSKKLKSVKE
LLGITIMERSSFEKNPIDFLEAKGYKEVKKDLIIKLPKYSLFELENGRKRMLASARFLQ
KGNELALPSKYVNFLYLASHYEKLKGSPEDNEQKQLFVEQHKHYLDEIIEQISEFSKR
VILADANLDKVLSAYNKHRDKPIREQAENIIHLFTLTNLGAPRAFKYFDTTIDRKVYR
STKEVLDATLIHQSITGLYETRIDLSQLGGDGGSGGSGGSGGSGGSGGSGGDKKYSIG
LAIGTNSVGWAVITDEYKVPSKKFKVLGNTDRHSIKKNLIGALLFDSGETAEATRLK
RTARRRYTRRKNRICYLQEIFSNEMAKVDDSFFHRLEESFLVEEDKKHERHPIFGNIV
DEVAYHEKYPTIYHLRKKLVDSTDKADLRLIYLALAHMIKFRGHFLIEGDLNPDNSD
VDKLFIQLVQTYNQLFEENPINASGVDAKAILSARLSKSRRLENLIAQLPGEKKNGLF
GNLIALSLGLTPNFKSNFDLAEDAKLQLSKDTYDDDLDNLLAQIGDQYADLFLAAKN
LSDAILLSDILRVNTEITKAPLSASMIKRYDEHHQDLTLLKALVRQQLPEKYKEIFFDQ
SKNGYAGYIDGGASQEEFYKFIKPILEKMDGTEELLVKLNREDLLRKQRTFDNGSIPH
QIHLGELHAILRRQEDFYPFLKDNREKIEKILTFRIPYYVGPLARGNSRFAWMTRKSEE
TITPWNFEEVVDKGASAQSFIERMTNFDKNLPNEKVLPKHSLLYEYFTVYNELTKVK
YVTEGMRKPAFLSGEQKKAIVDLLFKTNRKVTVKQLKEDYFKKIECFDSVEISGVED
RFNASLGTYHDLLKIIKDKDFLDNEENEDILEDIVLTLTLFEDREMIEERLKTYAHLFD
DKVMKQLKRRRYTGWGRLSRKLINGIRDKQSGKTILDFLKSDGFANRNFMQLIHDD
SLTFKEDIQKAQVSGQGDSLHEHIANLAGSPAIKKGILQTVKVVDELVKVMGRHKPE
NIVIEMARENQTTQKGQKNSRERMKRIEEGIKELGSQILKEHPVENTQLQNEKLYLY
YLQNGRDMYVDQELDINRLSDYDVDHIVPQSFLKDDSIDNKVLTRSDKNRGKSDNV
PSEEVVKKMKNYWRQLLNAKLITQRKFDNLTKAERGGLSELDKAGFIKRQLVETRQI
TKHVAQILDSRMNTKYDENDKLIREVKVITLKSKLVSDFRKDFQFYKVREINNYHHA
HDAYLNAVVGTALIKKYPKLESEFVYGDYKVYDVRKMIAKSEQEIGKATAKYFFYS
SGGSKRTADGSEFEPKKKRKV
ABE8e-SaCas9 dimer editor: NLS, wtTadA, linker, TadA*, SaCas9
(SEQ ID NO: 379)
MKRTADGSEFESPKKKRKVSEVEFSHEYWMRHALTLAKRAWDEREVPVGAVLVHN
NRVIGEGWNRPIGRHDPTAHAEIMALRQGGLVMQNYRLIDATLYVTLEPCVMCAGA
MIHSRIGRVVFGARDAKTGAAGSLMDVLHHPGMNHRVEITEGILADECAALLSDFFR
MRRQEIKAQKKAQSSTDSGGSSGGSSGSETPGTSESATPESSGGSSGGSSEVEFSHEY
WMRHALTLAKRARDEREVPVGAVLVLNNRVIGEGWNRAIGLHDPTAHAEIMALRQ
GGLVMQNYRLIDATLYVTFEPCVMCAGAMIHSRIGRVVFGVRNSKRGAAGSLMNV
LNYPGMNHRVEITEGILADECAALLCDFYRMPRQVFNAQKKAQSSINSGGSSGGSSG
SETPGTSESATPESSGGSSGGSGKRNYILGLAIGITSVGYGIIDYETRDVIDAGVRLFKE
ANVENNEGRRSKRGARRLKRRRRHRIQRVKKLLFDYNLLTDHSELSGINPYEARVK
GLSQKLSEEEFSAALLHLAKRRGVHNVNEVEEDTGNELSTKEQISRNSKALEEKYVA
ELQLERLKKDGEVRGSINRFKTSDYVKEAKQLLKVQKAYHQLDQSFIDTYIDLLETR
RTYYEGPGEGSPFGWKDIKEWYEMLMGHCTYFPEELRSVKYAYNADLYNALNDLN
NLVITRDENEKLEYYEKFQIIENVFKQKKKPTLKQIAKEILVNEEDIKGYRVTSTGKPE
FTNLKVYHDIKDITARKEIIENAELLDQIAKILTIYQSSEDIQEELTNLNSELTQEEIEQIS
NLKGYTGTHNLSLKAINLILDELWHTNDNQIAIFNRLKLVPKKVDLSQQKEIPTTLVD
DFILSPVVKRSFIQSIKVINAIIKKYGLPNDIIIELAREKNSKDAQKMINEMQKRNRQTN
ERIEEIIRTTGKENAKYLIEKIKLHDMQEGKCLYSLEAIPLEDLLNNPFNYEVDHIIPRS
VSFDNSFNNKVLVKQEENSKKGNRTPFQYLSSSDSKISYETFKKHILNLAKGKGRISK
TKKEYLLEERDINRFSVQKDFINRNLVDTRYATRGLMNLLRSYFRVNNLDVKVKSIN
GGFTSFLRRKWKFKKERNKGYKHHAEDALIIANADFIFKEWKKLDKAKKVMENQM
FEEKQAESMPEIETEQEYKEIFITPHQIKHIKDFKDYKYSHRVDKKPNRELINDTLYST
RKDDKGNTLIVNNLNGLYDKDNDKLKKLINKSPEKLLMYHHDPQTYQKLKLIMEQY
GDEKNPLYKYYEETGNYLTKYSKKDNGPVIKKIKYYGNKLNAHLDITDDYPNSRNK
VVKLSLKPYRFDVYLDNGVYKFVTVKNLDVIKKENYYEVNSKCYEEAKKLKKISNQ
AEFIASFYNNDLIKINGELYRVIGVNNDLLNRIEVNMIDITYREYLENMNDKRPPRIIK
TIASKTQSIKKYSTDILGNLYEVKSKKHPQIIKKGSGGSKRTADGSEFEPKKKRKV
ABE8e-SaCas9 monomer editor: NLS, linker, TadA*, SaCas9
(SEQ ID NO: 378)
MKRTADGSEFESPKKKRKVSEVEFSHEYWMRHALTLAKRARDEREVPVGAVLVLN
NRVIGEGWNRAIGLHDPTAHAEIMALRQGGLVMQNYRLIDATLYVTFEPCVMCAGA
MIHSRIGRVVFGVRNSKRGAAGSLMNVLNYPGMNHRVEITEGILADECAALLCDFY
RMPRQVFNAQKKAQSSINSGGSSGGSSGSETPGTSESATPESSGGSSGGSGKRNYILG
LAIGITSVGYGIIDYETRDVIDAGVRLFKEANVENNEGRRSKRGARRLKRRRRHRIQR
VKKLLFDYNLLTDHSELSGINPYEARVKGLSQKLSEEEFSAALLHLAKRRGVHNVNE
VEEDTGNELSTKEQISRNSKALEEKYVAELQLERLKKDGEVRGSINRFKTSDYVKEA
KQLLKVQKAYHQLDQSFIDTYIDLLETRRTYYEGPGEGSPFGWKDIKEWYEMLMGH
CTYFPEELRSVKYAYNADLYNALNDLNNLVITRDENEKLEYYEKFQIIENVFKQKKK
PTLKQIAKEILVNEEDIKGYRVTSTGKPEFTNLKVYHDIKDITARKEIIENAELLDQIAK
ILTIYQSSEDIQEELTNLNSELTQEEIEQISNLKGYTGTHNLSLKAINLILDELWHTNDN
QIAIFNRLKLVPKKVDLSQQKEIPTTLVDDFILSPVVKRSFIQSIKVINAIIKKYGLPNDII
IELAREKNSKDAQKMINEMQKRNRQTNERIEEIIRTTGKENAKYLIEKIKLHDMQEGK
CLYSLEAIPLEDLLNNPFNYEVDHIIPRSVSFDNSFNNKVLVKQEENSKKGNRTPFQY
LSSSDSKISYETFKKHILNLAKGKGRISKTKKEYLLEERDINRFSVQKDFINRNLVDTR
YATRGLMNLLRSYFRVNNLDVKVKSINGGFTSFLRRKWKFKKERNKGYKHHAEDA
LIIANADFIFKEWKKLDKAKKVMENQMFEEKQAESMPEIETEQEYKEIFITPHQIKHIK
DFKDYKYSHRVDKKPNRELINDTLYSTRKDDKGNTLIVNNLNGLYDKDNDKLKKLI
NKSPEKLLMYHHDPQTYQKLKLIMEQYGDEKNPLYKYYEETGNYLTKYSKKDNGP
VIKKIKYYGNKLNAHLDITDDYPNSRNKVVKLSLKPYRFDVYLDNGVYKFVTVKNL
DVIKKENYYEVNSKCYEEAKKLKKISNQAEFIASFYNNDLIKINGELYRVIGVNNDLL
NRIEVNMIDITYREYLENMNDKRPPRIIKTIASKTQSIKKYSTDILGNLYEVKSKKHPQI
IKKGSGGSKRTADGSEFEPKKKRKV
ABE8e-NRCH dimer editor: NLS, wtTadA, linker, TadA*, SpCas9-NRCH
(SEQ ID NO: 398)
MKRTADGSEFESPKKKRKVSEVEFSHEYWMRHALTLAKRAWDEREVPVGAVLVHN
NRVIGEGWNRPIGRHDPTAHAEIMALRQGGLVMQNYRLIDATLYVTLEPCVMCAGA
MIHSRIGRVVFGARDAKTGAAGSLMDVLHHPGMNHRVEITEGILADECAALLSDFFR
MRRQEIKAQKKAQSSTDSGGSSGGSSGSETPGTSESATPESSGGSSGGSSEVEFSHEY
WMRHALTLAKRARDEREVPVGAVLVLNNRVIGEGWNRAIGLHDPTAHAEIMALRQ
GGLVMQNYRLIDATLYVTFEPCVMCAGAMIHSRIGRVVFGVRNSKRGAAGSLMNV
LNYPGMNHRVEITEGILADECAALLCDFYRMPRQVFNAQKKAQSSINSGGSSGGSSG
SETPGTSESATPESSGGSSGGSDKKYSIGLAIGTNSVGWAVITDEYKVPSKKFKVLGN
TDRHSIKKNLIGALLFDSGETAEATRLKRTARRRYTRRKNRICYLQEIFSNEMAKVDD
SFFHRLEESFLVEEDKKHERHPIFGNIVDEVAYHEKYPTIYHLRKKLVDSTDKADLRL
IYLALAHMIKFRGHFLIEGDLNPDNSDVDKLFIQLVQTYNQLFEENPINASGVDAKAI
LSARLSKSRRLENLIAQLPGEKKNGLFGNLIALSLGLTPNFKSNFDLAEDAKLQLSKD
TYDDDLDNLLAQIGDQYADLFLAAKNLSDAILLSDILRVNTEITKAPLSASMVKRYD
EHHQDLTLLKALVRQQLPEKYKEIFFDQSKNGYAGYIDGGASQEEFYKFIKPILEKM
DGTEELLVKLNREDLLRKQRTFDNGIIPHQIHLGELHAILRRQGDFYPFLKDNREKIEK
ILTFRIPYYVGPLARGNSRFAWMTRKSEETITPWNFEEVVDKGASAQSFIERMTNFDK
NLPNEKVLPKHSLLYEYFTVYNELTKVKYVTEGMRKPAFLSGEQKKAIVDLLFKTNR
KVTVKQLKEDYFKKIECFDSVEISGVEDRFNASLGTYHDLLKIIKDKDFLDNEENEDI
LEDIVLTLTLFEDREMIEERLKTYAHLFDDKVMKQLKRLRYTGWGRLSRKLINGIRD
KQSGKTILDFLKSDGFANRNFMQLIHDDSLTFKEDIQKAQVSCQGDSLHEHIANLAGS
PAIKKGILQTVKVVDELIKVMGGHKPENIVIEMARENQTTQKGQKNSRERMKRIEEGI
KELGSQILKEHPVENTQLQNEKLYLYYLQNGRDMYVDQELDINRLSDYDVDHIVPQ
SFLKDDSIENKVLTRSDKNRGKSDNVPSEEVVKKMKNYWRQLLNAKLITQRKFDNL
TKAERGGLSELDKAGFIKRQLAETRQITKHVAQILDSRMNTKYDENDKLIREVKVITL
KSKLVSDFRKDFQFYKVREINNYHHAHDAYLNAVVGTALIKKYPKLESEFVYGDYK
VYDVRKMIAKSEQEIGKATAKYFFYSNIMNFFKTEITLANGEIRKRPLIETNGETGEIV
WDKGRDFATVRKVLSMPQVNIVKKTEVQTGGFSKESILPKGNSDKLIARKKDWDPK
KYGGFNSPTVAYSVLVVAKVEKGKSKKLKSVKELLGITIMERSSFEKNPIDFLEAKG
YKEVKKDLIIKLPKYSLFELENGRKRMLASAGVLQKGNELALPSKYVNFLYLASHYE
KLKGSPEDNEQKQLFVEQHKHYLDEIIEQISEFSKRVILADANLDKVLSAYNKHRDKP
IREQAENIIHLFTLTNLGAPAAFKYFDTTINRKQYNTTKEVLDATLIRQSITGLYETRID
LSQLGGDSGGSKRTADGSEFEPKKKRKV
ABE8e-NRCH monomer editor: NLS, linker, TadA*, SpCas9-NRCH
(SEQ ID NO: 399)
MKRTADGSEFESPKKKRKVSEVEFSHEYWMRHALTLAKRARDEREVPVGAVLVLN
NRVIGEGWNRAIGLHDPTAHAEIMALRQGGLVMQNYRLIDATLYVTFEPCVMCAGA
MIHSRIGRVVFGVRNSKRGAAGSLMNVLNYPGMNHRVEITEGILADECAALLCDFY
RMPRQVFNAQKKAQSSINSGGSSGGSSGSETPGTSESATPESSGGSSGGSDKKYSIGL
AIGTNSVGWAVITDEYKVPSKKFKVLGNTDRHSIKKNLIGALLFDSGETAEATRLKR
TARRRYTRRKNRICYLQEIFSNEMAKVDDSFFHRLEESFLVEEDKKHERHPIFGNIVD
EVAYHEKYPTIYHLRKKLVDSTDKADLRLIYLALAHMIKFRGHFLIEGDLNPDNSDV
DKLFIQLVQTYNQLFEENPINASGVDAKAILSARLSKSRRLENLIAQLPGEKKNGLFG
NLIALSLGLTPNFKSNFDLAEDAKLQLSKDTYDDDLDNLLAQIGDQYADLFLAAKNL
SDAILLSDILRVNTEITKAPLSASMVKRYDEHHQDLTLLKALVRQQLPEKYKEIFFDQ
SKNGYAGYIDGGASQEEFYKFIKPILEKMDGTEELLVKLNREDLLRKQRTFDNGIIPH
QIHLGELHAILRRQGDFYPFLKDNREKIEKILTFRIPYYVGPLARGNSRFAWMTRKSE
ETITPWNFEEVVDKGASAQSFIERMTNFDKNLPNEKVLPKHSLLYEYFTVYNELTKV
KYVTEGMRKPAFLSGEQKKAIVDLLFKTNRKVTVKQLKEDYFKKIECFDSVEISGVE
DRFNASLGTYHDLLKIIKDKDFLDNEENEDILEDIVLTLTLFEDREMIEERLKTYAHLF
DDKVMKQLKRLRYTGWGRLSRKLINGIRDKQSGKTILDFLKSDGFANRNFMQLIHD
DSLTFKEDIQKAQVSCQGDSLHEHIANLAGSPAIKKGILQTVKVVDELIKVMGGHKP
ENIVIEMARENQTTQKGQKNSRERMKRIEEGIKELGSQILKEHPVENTQLQNEKLYLY
YLQNGRDMYVDQELDINRLSDYDVDHIVPQSFLKDDSIENKVLTRSDKNRGKSDNV
PSEEVVKKMKNYWRQLLNAKLITQRKFDNLTKAERGGLSELDKAGFIKRQLAETRQI
TKHVAQILDSRMNTKYDENDKLIREVKVITLKSKLVSDFRKDFQFYKVREINNYHHA
HDAYLNAVVGTALIKKYPKLESEFVYGDYKVYDVRKMIAKSEQEIGKATAKYFFYS
NIMNFFKTEITLANGEIRKRPLIETNGETGEIVWDKGRDFATVRKVLSMPQVNIVKKT
EVQTGGFSKESILPKGNSDKLIARKKDWDPKKYGGFNSPTVAYSVLVVAKVEKGKS
KKLKSVKELLGITIMERSSFEKNPIDFLEAKGYKEVKKDLIIKLPKYSLFELENGRKRM
LASAGVLQKGNELALPSKYVNFLYLASHYEKLKGSPEDNEQKQLFVEQHKHYLDEII
EQISEFSKRVILADANLDKVLSAYNKHRDKPIREQAENIIHLFTLTNLGAPAAFKYFDT
TINRKQYNTTKEVLDATLIRQSITGLYETRIDLSQLGGDSGGSKRTADGSEFEPKKKR
KV
ABESe-NRRH dimer editor: NLS, wtTadA, linker, TadA*, SpCas9-NRRH
(SEQ ID NO: 400)
MKRTADGSEFESPKKKRKVSEVEFSHEYWMRHALTLAKRAWDEREVPVGAVLVHN
NRVIGEGWNRPIGRHDPTAHAEIMALRQGGLVMQNYRLIDATLYVTLEPCVMCAGA
MIHSRIGRVVFGARDAKTGAAGSLMDVLHHPGMNHRVEITEGILADECAALLSDFFR
MRRQEIKAQKKAQSSTDSGGSSGGSSGSETPGTSESATPESSGGSSGGSSEVEFSHEY
WMRHALTLAKRARDEREVPVGAVLVLNNRVIGEGWNRAIGLHDPTAHAEIMALRQ
GGLVMQNYRLIDATLYVTFEPCVMCAGAMIHSRIGRVVFGVRNSKRGAAGSLMNV
LNYPGMNHRVEITEGILADECAALLCDFYRMPRQVFNAQKKAQSSINSGGSSGGSSG
SETPGTSESATPESSGGSSGGSDKKYSIGLAIGTNSVGWAVITDEYKVPSKKFKVLGN
TDRHSIKKNLIGALLFDSGETAEATRLKRTARRRYTRRKNRICYLQEIFSNEMAKVDD
SFFHRLEESFLVEEDKKHERHPIFGNIVDEVAYHEKYPTIYHLRKKLVDSTDKADLRL
IYLALAHMIKFRGHFLIEGDLNPDNSDVDKLFIQLVQTYNQLFEENPINASGVDAKAI
LSARLSKSRRLENLIAQLPGEKKNGLFGNLIALSLGLTPNFKSNFDLAEDAKLQLSKD
TYDDDLDNLLAQIGDQYADLFLAAKNLSDAILLSDILRVNTEITKAPLSASMVKRYD
EHHQDLTLLKALVRQQLPEKYKEIFFDQSKNGYAGYIDGGASQEEFYKFIKPILEKM
DGTEELLVKLNREDLLRKQRTFDNGIIPHQIHLGELHAILRRQGDFYPFLKDNREKIEK
ILTFRIPYYVGPLARGNSRFAWMTRKSEETITPWNFEEVVDKGASAQSFIERMTNFDK
NLPNEKVLPKHSLLYEYFTVYNELTKVKYVTEGMRKPAFLSGEQKKAIVDLLFKTNR
KVTVKQLKEDYFKKIECFDSVEISGVEDRFNASLGTYHDLLKIIKDKDFLDNEENEDI
LEDIVLTLTLFEDREMIEERLKTYAHLFDDKVMKQLKRLRYTGWGRLSRKLINGIRD
KQSGKTILDFLKSDGFANRNFMQLIHDDSLTFKEDIQKAQVSCQGDSLHEHIANLAGS
PAIKKGILQTVKVVDELIKVMGGHKPENIVIEMARENQTTQKGQKNSRERMKRIEEGI
KELGSQILKEHPVENTQLQNEKLYLYYLQNGRDMYVDQELDINRLSDYDVDHIVPQ
SFLKDDSIENKVLTRSDKNRGKSDNVPSEEVVKKMKNYWRQLLNAKLITQRKFDNL
TKAERGGLSELDKAGFIKRQLAETRQITKHVAQILDSRMNTKYDENDKLIREVKVITL
KSKLVSDFRKDFQFYKVREINNYHHAHDAYLNAVVGTALIKKYPKLESEFVYGDYK
VYDVRKMIAKSEQEIGKATAKYFFYSNIMNFFKTEITLANGEIRKRPLIETNGETGEIV
WDKGRDFATVRKVLSMPQVNIVKKTEVQTGGFSKESILPKGNSDKLIARKKDWDPK
KYGGFNSPTAAYSVLVVAKVEKGKSKKLKSVKELLGITIMERSSFEKNPIGFLEAKG
YKEVKKDLIIKLPKYSLFELENGRKRMLASAGVLHKGNELALPSKYVNFLYLASHYE
KLKGSPEDNEQKQLFVEQHKHYLDEIIEQISEFSKRVILADANLDKVLSAYNKHRDKP
IREQAENIIHLFTLTNLGVPAAFKYFDTTIDKKRYTSTKEVLDATLIHQSITGLYETRID
LSQLGGDSGGSKRTADGSEFEPKKKRKV
ABESe-NRRH monomer editor: NLS, linker, TadA*, SpCas9-NRRH
(SEQ ID NO: 401)
MKRTADGSEFESPKKKRKVSEVEFSHEYWMRHALTLAKRARDEREVPVGAVLVLN
NRVIGEGWNRAIGLHDPTAHAEIMALRQGGLVMQNYRLIDATLYVTFEPCVMCAGA
MIHSRIGRVVFGVRNSKRGAAGSLMNVLNYPGMNHRVEITEGILADECAALLCDFY
RMPRQVFNAQKKAQSSINSGGSSGGSSGSETPGTSESATPESSGGSSGGSDKKYSIGL
AIGTNSVGWAVITDEYKVPSKKFKVLGNTDRHSIKKNLIGALLFDSGETAEATRLKR
TARRRYTRRKNRICYLQEIFSNEMAKVDDSFFHRLEESFLVEEDKKHERHPIFGNIVD
EVAYHEKYPTIYHLRKKLVDSTDKADLRLIYLALAHMIKFRGHFLIEGDLNPDNSDV
DKLFIQLVQTYNQLFEENPINASGVDAKAILSARLSKSRRLENLIAQLPGEKKNGLFG
NLIALSLGLTPNFKSNFDLAEDAKLQLSKDTYDDDLDNLLAQIGDQYADLFLAAKNL
SDAILLSDILRVNTEITKAPLSASMVKRYDEHHQDLTLLKALVRQQLPEKYKEIFFDQ
SKNGYAGYIDGGASQEEFYKFIKPILEKMDGTEELLVKLNREDLLRKQRTFDNGIIPH
QIHLGELHAILRRQGDFYPFLKDNREKIEKILTFRIPYYVGPLARGNSRFAWMTRKSE
ETITPWNFEEVVDKGASAQSFIERMTNFDKNLPNEKVLPKHSLLYEYFTVYNELTKV
KYVTEGMRKPAFLSGEQKKAIVDLLFKTNRKVTVKQLKEDYFKKIECFDSVEISGVE
DRFNASLGTYHDLLKIIKDKDFLDNEENEDILEDIVLTLTLFEDREMIEERLKTYAHLF
DDKVMKQLKRLRYTGWGRLSRKLINGIRDKQSGKTILDFLKSDGFANRNFMQLIHD
DSLTFKEDIQKAQVSCQGDSLHEHIANLAGSPAIKKGILQTVKVVDELIKVMGGHKP
ENIVIEMARENQTTQKGQKNSRERMKRIEEGIKELGSQILKEHPVENTQLQNEKLYLY
YLQNGRDMYVDQELDINRLSDYDVDHIVPQSFLKDDSIENKVLTRSDKNRGKSDNV
PSEEVVKKMKNYWRQLLNAKLITQRKFDNLTKAERGGLSELDKAGFIKRQLAETRQI
TKHVAQILDSRMNTKYDENDKLIREVKVITLKSKLVSDFRKDFQFYKVREINNYHHA
HDAYLNAVVGTALIKKYPKLESEFVYGDYKVYDVRKMIAKSEQEIGKATAKYFFYS
NIMNFFKTEITLANGEIRKRPLIETNGETGEIVWDKGRDFATVRKVLSMPQVNIVKKT
EVQTGGFSKESILPKGNSDKLIARKKDWDPKKYGGFNSPTAAYSVLVVAKVEKGKS
KKLKSVKELLGITIMERSSFEKNPIGFLEAKGYKEVKKDLIIKLPKYSLFELENGRKRM
LASAGVLHKGNELALPSKYVNFLYLASHYEKLKGSPEDNEQKQLFVEQHKHYLDEII
EQISEFSKRVILADANLDKVLSAYNKHRDKPIREQAENIIHLFTLTNLGVPAAFKYFDT
TIDKKRYTSTKEVLDATLIHQSITGLYETRIDLSQLGGDSGGSKRTADGSEFEPKKKR
KV
SaKKH-ABESe dimer editor: NLS, wtTadA, linker, TadA*, SaKKH
(SEQ ID NO: 402)
MKRTADGSEFESPKKKRKVSEVEFSHEYWMRHALTLAKRAWDEREVPVGAVLVHN
NRVIGEGWNRPIGRHDPTAHAEIMALRQGGLVMQNYRLIDATLYVTLEPCVMCAGA
MIHSRIGRVVFGARDAKTGAAGSLMDVLHHPGMNHRVEITEGILADECAALLSDFFR
MRRQEIKAQKKAQSSTDSGGSSGGSSGSETPGTSESATPESSGGSSGGSSEVEFSHEY
WMRHALTLAKRARDEREVPVGAVLVLNNRVIGEGWNRAIGLHDPTAHAEIMALRQ
GGLVMQNYRLIDATLYVTFEPCVMCAGAMIHSRIGRVVFGVRNSKRGAAGSLMNV
LNYPGMNHRVEITEGILADECAALLCDFYRMPRQVFNAQKKAQSSINSGGSSGGSSG
SETPGTSESATPESSGGSSGGSGKRNYILGLAIGITSVGYGIIDYETRDVIDAGVRLFKE
ANVENNEGRRSKRGARRLKRRRRHRIQRVKKLLFDYNLLTDHSELSGINPYEARVK
GLSQKLSEEEFSAALLHLAKRRGVHNVNEVEEDTGNELSTKEQISRNSKALEEKYVA
ELQLERLKKDGEVRGSINRFKTSDYVKEAKQLLKVQKAYHQLDQSFIDTYIDLLETR
RTYYEGPGEGSPFGWKDIKEWYEMLMGHCTYFPEELRSVKYAYNADLYNALNDLN
NLVITRDENEKLEYYEKFQIIENVFKQKKKPTLKQIAKEILVNEEDIKGYRVTSTGKPE
FTNLKVYHDIKDITARKEIIENAELLDQIAKILTIYQSSEDIQEELTNLNSELTQEEIEQIS
NLKGYTGTHNLSLKAINLILDELWHTNDNQIAIFNRLKLVPKKVDLSQQKEIPTTLVD
DFILSPVVKRSFIQSIKVINAIIKKYGLPNDIIIELAREKNSKDAQKMINEMQKRNRQTN
ERIEEIIRTTGKENAKYLIEKIKLHDMQEGKCLYSLEAIPLEDLLNNPFNYEVDHIIPRS
VSFDNSFNNKVLVKQEENSKKGNRTPFQYLSSSDSKISYETFKKHILNLAKGKGRISK
TKKEYLLEERDINRFSVQKDFINRNLVDTRYATRGLMNLLRSYFRVNNLDVKVKSIN
GGFTSFLRRKWKFKKERNKGYKHHAEDALIIANADFIFKEWKKLDKAKKVMENQM
FEEKQAESMPEIETEQEYKEIFITPHQIKHIKDFKDYKYSHRVDKKPNRKLINDTLYST
RKDDKGNTLIVNNLNGLYDKDNDKLKKLINKSPEKLLMYHHDPQTYQKLKLIMEQY
GDEKNPLYKYYEETGNYLTKYSKKDNGPVIKKIKYYGNKLNAHLDITDDYPNSRNK
VVKLSLKPYRFDVYLDNGVYKFVTVKNLDVIKKENYYEVNSKCYEEAKKLKKISNQ
AEFIASFYKNDLIKINGELYRVIGVNNDLLNRIEVNMIDITYREYLENMNDKRPPHIIK
TIASKTQSIKKYSTDILGNLYEVKSKKHPQIIKKGSGGSKRTADGSEFEPKKKRKV
SaKKH-ABESe monomer editor: NLS, linker, TadA*, SaKKH
(SEQ ID NO: 403)
MKRTADGSEFESPKKKRKVSEVEFSHEYWMRHALTLAKRARDEREVPVGAVLVLN
NRVIGEGWNRAIGLHDPTAHAEIMALRQGGLVMQNYRLIDATLYVTFEPCVMCAGA
MIHSRIGRVVFGVRNSKRGAAGSLMNVLNYPGMNHRVEITEGILADECAALLCDFY
RMPRQVFNAQKKAQSSINSGGSSGGSSGSETPGTSESATPESSGGSSGGSGKRNYILG
LAIGITSVGYGIIDYETRDVIDAGVRLFKEANVENNEGRRSKRGARRLKRRRRHRIQR
VKKLLFDYNLLTDHSELSGINPYEARVKGLSQKLSEEEFSAALLHLAKRRGVHNVNE
VEEDTGNELSTKEQISRNSKALEEKYVAELQLERLKKDGEVRGSINRFKTSDYVKEA
KQLLKVQKAYHQLDQSFIDTYIDLLETRRTYYEGPGEGSPFGWKDIKEWYEMLMGH
CTYFPEELRSVKYAYNADLYNALNDLNNLVITRDENEKLEYYEKFQIIENVFKQKKK
PTLKQIAKEILVNEEDIKGYRVTSTGKPEFTNLKVYHDIKDITARKEIIENAELLDQIAK
ILTIYQSSEDIQEELTNLNSELTQEEIEQISNLKGYTGTHNLSLKAINLILDELWHTNDN
QIAIFNRLKLVPKKVDLSQQKEIPTTLVDDFILSPVVKRSFIQSIKVINAIIKKYGLPNDII
IELAREKNSKDAQKMINEMQKRNRQTNERIEEIIRTTGKENAKYLIEKIKLHDMQEGK
CLYSLEAIPLEDLLNNPFNYEVDHIIPRSVSFDNSFNNKVLVKQEENSKKGNRTPFQY
LSSSDSKISYETFKKHILNLAKGKGRISKTKKEYLLEERDINRFSVQKDFINRNLVDTR
YATRGLMNLLRSYFRVNNLDVKVKSINGGFTSFLRRKWKFKKERNKGYKHHAEDA
LIIANADFIFKEWKKLDKAKKVMENQMFEEKQAESMPEIETEQEYKEIFITPHQIKHIK
DFKDYKYSHRVDKKPNRKLINDTLYSTRKDDKGNTLIVNNLNGLYDKDNDKLKKLI
NKSPEKLLMYHHDPQTYQKLKLIMEQYGDEKNPLYKYYEETGNYLTKYSKKDNGP
VIKKIKYYGNKLNAHLDITDDYPNSRNKVVKLSLKPYRFDVYLDNGVYKFVTVKNL
DVIKKENYYEVNSKCYEEAKKLKKISNQAEFIASFYKNDLIKINGELYRVIGVNNDLL
NRIEVNMIDITYREYLENMNDKRPPHIIKTIASKTQSIKKYSTDILGNLYEVKSKKHPQI
IKKGSGGSKRTADGSEFEPKKKRKV
ABESe-NG dimer editor: NLS, wtTadA, linker, TadA*, SpCas9-NG
(SEQ ID NO: 387)
MKRTADGSEFESPKKKRKVSEVEFSHEYWMRHALTLAKRAWDEREVPVGAVLVHN
NRVIGEGWNRPIGRHDPTAHAEIMALRQGGLVMQNYRLIDATLYVTLEPCVMCAGA
MIHSRIGRVVFGARDAKTGAAGSLMDVLHHPGMNHRVEITEGILADECAALLSDFFR
MRRQEIKAQKKAQSSTDSGGSSGGSSGSETPGTSESATPESSGGSSGGSSEVEFSHEY
WMRHALTLAKRARDEREVPVGAVLVLNNRVIGEGWNRAIGLHDPTAHAEIMALRQ
GGLVMQNYRLIDATLYVTFEPCVMCAGAMIHSRIGRVVFGVRNSKRGAAGSLMNV
LNYPGMNHRVEITEGILADECAALLCDFYRMPRQVFNAQKKAQSSINSGGSSGGSSG
SETPGTSESATPESSGGSSGGSDKKYSIGLAIGTNSVGWAVITDEYKVPSKKFKVLGN
TDRHSIKKNLIGALLFDSGETAEATRLKRTARRRYTRRKNRICYLQEIFSNEMAKVDD
SFFHRLEESFLVEEDKKHERHPIFGNIVDEVAYHEKYPTIYHLRKKLVDSTDKADLRL
IYLALAHMIKFRGHFLIEGDLNPDNSDVDKLFIQLVQTYNQLFEENPINASGVDAKAI
LSARLSKSRRLENLIAQLPGEKKNGLFGNLIALSLGLTPNFKSNFDLAEDAKLQLSKD
TYDDDLDNLLAQIGDQYADLFLAAKNLSDAILLSDILRVNTEITKAPLSASMIKRYDE
HHQDLTLLKALVRQQLPEKYKEIFFDQSKNGYAGYIDGGASQEEFYKFIKPILEKMD
GTEELLVKLNREDLLRKQRTFDNGSIPHQIHLGELHAILRRQEDFYPFLKDNREKIEKI
LTFRIPYYVGPLARGNSRFAWMTRKSEETITPWNFEEVVDKGASAQSFIERMTNFDK
NLPNEKVLPKHSLLYEYFTVYNELTKVKYVTEGMRKPAFLSGEQKKAIVDLLFKTNR
KVTVKQLKEDYFKKIECFDSVEISGVEDRFNASLGTYHDLLKIIKDKDFLDNEENEDI
LEDIVLTLTLFEDREMIEERLKTYAHLFDDKVMKQLKRRRYTGWGRLSRKLINGIRD
KQSGKTILDFLKSDGFANRNFMQLIHDDSLTFKEDIQKAQVSGQGDSLHEHIANLAG
SPAIKKGILQTVKVVDELVKVMGRHKPENIVIEMARENQTTQKGQKNSRERMKRIEE
GIKELGSQILKEHPVENTQLQNEKLYLYYLQNGRDMYVDQELDINRLSDYDVDHIVP
QSFLKDDSIDNKVLTRSDKNRGKSDNVPSEEVVKKMKNYWRQLLNAKLITQRKFDN
LTKAERGGLSELDKAGFIKRQLVETRQITKHVAQILDSRMNTKYDENDKLIREVKVIT
LKSKLVSDFRKDFQFYKVREINNYHHAHDAYLNAVVGTALIKKYPKLESEFVYGDY
KVYDVRKMIAKSEQEIGKATAKYFFYSNIMNFFKTEITLANGEIRKRPLIETNGETGEI
VWDKGRDFATVRKVLSMPQVNIVKKTEVQTGGFSKESIRPKRNSDKLIARKKDWDP
KKYGGFVSPTVAYSVLVVAKVEKGKSKKLKSVKELLGITIMERSSFEKNPIDFLEAK
GYKEVKKDLIIKLPKYSLFELENGRKRMLASARFLQKGNELALPSKYVNFLYLASHY
EKLKGSPEDNEQKQLFVEQHKHYLDEIIEQISEFSKRVILADANLDKVLSAYNKHRDK
PIREQAENIIHLFTLTNLGAPRAFKYFDTTIDRKVYRSTKEVLDATLIHQSITGLYETRI
DLSQLGGDSGGSKRTADGSEFEPKKKRKV
ABESe-NG monomer editor: NLS, linker, TadA*, SpCas9-NG(“NG-ABE8e”)
(SEQ ID NO: 386)
MKRTADGSEFESPKKKRKVSEVEFSHEYWMRHALTLAKRARDEREVPVGAVLVLN
NRVIGEGWNRAIGLHDPTAHAEIMALRQGGLVMQNYRLIDATLYVTFEPCVMCAGA
MIHSRIGRVVFGVRNSKRGAAGSLMNVLNYPGMNHRVEITEGILADECAALLCDFY
RMPRQVFNAQKKAQSSINSGGSSGGSSGSETPGTSESATPESSGGSSGGSDKKYSIGL
AIGTNSVGWAVITDEYKVPSKKFKVLGNTDRHSIKKNLIGALLFDSGETAEATRLKR
TARRRYTRRKNRICYLQEIFSNEMAKVDDSFFHRLEESFLVEEDKKHERHPIFGNIVD
EVAYHEKYPTIYHLRKKLVDSTDKADLRLIYLALAHMIKFRGHFLIEGDLNPDNSDV
DKLFIQLVQTYNQLFEENPINASGVDAKAILSARLSKSRRLENLIAQLPGEKKNGLFG
NLIALSLGLTPNFKSNFDLAEDAKLQLSKDTYDDDLDNLLAQIGDQYADLFLAAKNL
SDAILLSDILRVNTEITKAPLSASMIKRYDEHHQDLTLLKALVRQQLPEKYKEIFFDQS
KNGYAGYIDGGASQEEFYKFIKPILEKMDGTEELLVKLNREDLLRKQRTFDNGSIPHQ
IHLGELHAILRRQEDFYPFLKDNREKIEKILTFRIPYYVGPLARGNSRFAWMTRKSEET
ITPWNFEEVVDKGASAQSFIERMTNFDKNLPNEKVLPKHSLLYEYFTVYNELTKVKY
VTEGMRKPAFLSGEQKKAIVDLLFKTNRKVTVKQLKEDYFKKIECFDSVEISGVEDR
FNASLGTYHDLLKIIKDKDFLDNEENEDILEDIVLTLTLFEDREMIEERLKTYAHLFDD
KVMKQLKRRRYTGWGRLSRKLINGIRDKQSGKTILDFLKSDGFANRNFMQLIHDDSL
TFKEDIQKAQVSGQGDSLHEHIANLAGSPAIKKGILQTVKVVDELVKVMGRHKPENI
VIEMARENQTTQKGQKNSRERMKRIEEGIKELGSQILKEHPVENTQLQNEKLYLYYL
QNGRDMYVDQELDINRLSDYDVDHIVPQSFLKDDSIDNKVLTRSDKNRGKSDNVPS
EEVVKKMKNYWRQLLNAKLITQRKFDNLTKAERGGLSELDKAGFIKRQLVETRQIT
KHVAQILDSRMNTKYDENDKLIREVKVITLKSKLVSDFRKDFQFYKVREINNYHHAH
DAYLNAVVGTALIKKYPKLESEFVYGDYKVYDVRKMIAKSEQEIGKATAKYFFYSNI
MNFFKTEITLANGEIRKRPLIETNGETGEIVWDKGRDFATVRKVLSMPQVNIVKKTEV
QTGGFSKESIRPKRNSDKLIARKKDWDPKKYGGFVSPTVAYSVLVVAKVEKGKSKK
LKSVKELLGITIMERSSFEKNPIDFLEAKGYKEVKKDLIIKLPKYSLFELENGRKRMLA
SARFLQKGNELALPSKYVNFLYLASHYEKLKGSPEDNEQKQLFVEQHKHYLDEIIEQI
SEFSKRVILADANLDKVLSAYNKHRDKPIREQAENIIHLFTLTNLGAPRAFKYFDTTID
RKVYRSTKEVLDATLIHQSITGLYETRIDLSQLGGDSGGSKRTADGSEFEPKKKRKV
ABE8e-CP1041 dimer editor: NLS, wtTadA, linker, TadA*, CP1041
(SEQ ID NO: 404)
MKRTADGSEFESPKKKRKVSEVEFSHEYWMRHALTLAKRAWDEREVPVGAVLVHN
NRVIGEGWNRPIGRHDPTAHAEIMALRQGGLVMQNYRLIDATLYVTLEPCVMCAGA
MIHSRIGRVVFGARDAKTGAAGSLMDVLHHPGMNHRVEITEGILADECAALLSDFFR
MRRQEIKAQKKAQSSTDSGGSSGGSSGSETPGTSESATPESSGGSSGGSSEVEFSHEY
WMRHALTLAKRARDEREVPVGAVLVLNNRVIGEGWNRAIGLHDPTAHAEIMALRQ
GGLVMQNYRLIDATLYVTFEPCVMCAGAMIHSRIGRVVFGVRNSKRGAAGSLMNV
LNYPGMNHRVEITEGILADECAALLCDFYRMPRQVFNAQKKAQSSINSGGSSGGSSG
SETPGTSESATPESSGGSSGGSNIMNFFKTEITLANGEIRKRPLIETNGETGEIVWDKGR
DFATVRKVLSMPQVNIVKKTEVQTGGFSKESILPKRNSDKLIARKKDWDPKKYGGF
DSPTVAYSVLVVAKVEKGKSKKLKSVKELLGITIMERSSFEKNPIDFLEAKGYKEVK
KDLIIKLPKYSLFELENGRKRMLASAGELQKGNELALPSKYVNFLYLASHYEKLKGS
PEDNEQKQLFVEQHKHYLDEIIEQISEFSKRVILADANLDKVLSAYNKHRDKPIREQA
ENIIHLFTLTNLGAPAAFKYFDTTIDRKRYTSTKEVLDATLIHQSITGLYETRIDLSQLG
GDGGSGGSGGSGGSGGSGGSGGDKKYSIGLAIGTNSVGWAVITDEYKVPSKKFKVL
GNTDRHSIKKNLIGALLFDSGETAEATRLKRTARRRYTRRKNRICYLQEIFSNEMAKV
DDSFFHRLEESFLVEEDKKHERHPIFGNIVDEVAYHEKYPTIYHLRKKLVDSTDKADL
RLIYLALAHMIKFRGHFLIEGDLNPDNSDVDKLFIQLVQTYNQLFEENPINASGVDAK
AILSARLSKSRRLENLIAQLPGEKKNGLFGNLIALSLGLTPNFKSNFDLAEDAKLQLSK
DTYDDDLDNLLAQIGDQYADLFLAAKNLSDAILLSDILRVNTEITKAPLSASMIKRYD
EHHQDLTLLKALVRQQLPEKYKEIFFDQSKNGYAGYIDGGASQEEFYKFIKPILEKM
DGTEELLVKLNREDLLRKQRTFDNGSIPHQIHLGELHAILRRQEDFYPFLKDNREKIE
KILTFRIPYYVGPLARGNSRFAWMTRKSEETITPWNFEEVVDKGASAQSFIERMTNFD
KNLPNEKVLPKHSLLYEYFTVYNELTKVKYVTEGMRKPAFLSGEQKKAIVDLLFKT
NRKVTVKQLKEDYFKKIECFDSVEISGVEDRFNASLGTYHDLLKIIKDKDFLDNEENE
DILEDIVLTLTLFEDREMIEERLKTYAHLFDDKVMKQLKRRRYTGWGRLSRKLINGIR
DKQSGKTILDFLKSDGFANRNFMQLIHDDSLTFKEDIQKAQVSGQGDSLHEHIANLA
GSPAIKKGILQTVKVVDELVKVMGRHKPENIVIEMARENQTTQKGQKNSRERMKRIE
EGIKELGSQILKEHPVENTQLQNEKLYLYYLQNGRDMYVDQELDINRLSDYDVDHIV
PQSFLKDDSIDNKVLTRSDKNRGKSDNVPSEEVVKKMKNYWRQLLNAKLITQRKFD
NLTKAERGGLSELDKAGFIKRQLVETRQITKHVAQILDSRMNTKYDENDKLIREVKV
ITLKSKLVSDFRKDFQFYKVREINNYHHAHDAYLNAVVGTALIKKYPKLESEFVYGD
YKVYDVRKMIAKSEQEIGKATAKYFFYSSGGSKRTADGSEFEPKKKRKV
ABE8e-CP1041 monomer editor: NLS, linker, TadA*, CP1041
(SEQ ID NO: 390)
MKRTADGSEFESPKKKRKVSEVEFSHEYWMRHALTLAKRARDEREVPVGAVLVLN
NRVIGEGWNRAIGLHDPTAHAEIMALRQGGLVMQNYRLIDATLYVTFEPCVMCAGA
MIHSRIGRVVFGVRNSKRGAAGSLMNVLNYPGMNHRVEITEGILADECAALLCDFY
RMPRQVFNAQKKAQSSINSGGSSGGSSGSETPGTSESATPESSGGSSGGSNIMNFFKT
EITLANGEIRKRPLIETNGETGEIVWDKGRDFATVRKVLSMPQVNIVKKTEVQTGGFS
KESILPKRNSDKLIARKKDWDPKKYGGFDSPTVAYSVLVVAKVEKGKSKKLKSVKE
LLGITIMERSSFEKNPIDFLEAKGYKEVKKDLIIKLPKYSLFELENGRKRMLASAGELQ
KGNELALPSKYVNFLYLASHYEKLKGSPEDNEQKQLFVEQHKHYLDEIIEQISEFSKR
VILADANLDKVLSAYNKHRDKPIREQAENIIHLFTLTNLGAPAAFKYFDTTIDRKRYT
STKEVLDATLIHQSITGLYETRIDLSQLGGDGGSGGSGGSGGSGGSGGSGGDKKYSIG
LAIGTNSVGWAVITDEYKVPSKKFKVLGNTDRHSIKKNLIGALLFDSGETAEATRLK
RTARRRYTRRKNRICYLQEIFSNEMAKVDDSFFHRLEESFLVEEDKKHERHPIFGNIV
DEVAYHEKYPTIYHLRKKLVDSTDKADLRLIYLALAHMIKFRGHFLIEGDLNPDNSD
VDKLFIQLVQTYNQLFEENPINASGVDAKAILSARLSKSRRLENLIAQLPGEKKNGLF
GNLIALSLGLTPNFKSNFDLAEDAKLQLSKDTYDDDLDNLLAQIGDQYADLFLAAKN
LSDAILLSDILRVNTEITKAPLSASMIKRYDEHHQDLTLLKALVRQQLPEKYKEIFFDQ
SKNGYAGYIDGGASQEEFYKFIKPILEKMDGTEELLVKLNREDLLRKQRTFDNGSIPH
QIHLGELHAILRRQEDFYPFLKDNREKIEKILTFRIPYYVGPLARGNSRFAWMTRKSEE
TITPWNFEEVVDKGASAQSFIERMTNFDKNLPNEKVLPKHSLLYEYFTVYNELTKVK
YVTEGMRKPAFLSGEQKKAIVDLLFKTNRKVTVKQLKEDYFKKIECFDSVEISGVED
RFNASLGTYHDLLKIIKDKDFLDNEENEDILEDIVLTLTLFEDREMIEERLKTYAHLFD
DKVMKQLKRRRYTGWGRLSRKLINGIRDKQSGKTILDFLKSDGFANRNFMQLIHDD
SLTFKEDIQKAQVSGQGDSLHEHIANLAGSPAIKKGILQTVKVVDELVKVMGRHKPE
NIVIEMARENQTTQKGQKNSRERMKRIEEGIKELGSQILKEHPVENTQLQNEKLYLY
YLQNGRDMYVDQELDINRLSDYDVDHIVPQSFLKDDSIDNKVLTRSDKNRGKSDNV
PSEEVVKKMKNYWRQLLNAKLITQRKFDNLTKAERGGLSELDKAGFIKRQLVETRQI
TKHVAQILDSRMNTKYDENDKLIREVKVITLKSKLVSDFRKDFQFYKVREINNYHHA
HDAYLNAVVGTALIKKYPKLESEFVYGDYKVYDVRKMIAKSEQEIGKATAKYFFYS
SGGSKRTADGSEFEPKKKRKV
ABE8e-CP1028 dimer editor: NLS, wtTadA, linker, TadA*, CP1028
(SEQ ID NO: 289)
MKRTADGSEFESPKKKRKVSEVEFSHEYWMRHALTLAKRAWDEREVPVGAVLVHN
NRVIGEGWNRPIGRHDPTAHAEIMALRQGGLVMQNYRLIDATLYVTLEPCVMCAGA
MIHSRIGRVVFGARDAKTGAAGSLMDVLHHPGMNHRVEITEGILADECAALLSDFFR
MRRQEIKAQKKAQSSTDSGGSSGGSSGSETPGTSESATPESSGGSSGGSSEVEFSHEY
WMRHALTLAKRARDEREVPVGAVLVLNNRVIGEGWNRAIGLHDPTAHAEIMALRQ
GGLVMQNYRLIDATLYVTFEPCVMCAGAMIHSRIGRVVFGVRNSKRGAAGSLMNV
LNYPGMNHRVEITEGILADECAALLCDFYRMPRQVFNAQKKAQSSINSGGSSGGSSG
SETPGTSESATPESSGGSSGGSEIGKATAKYFFYSNIMNFFKTEITLANGEIRKRPLIET
NGETGEIVWDKGRDFATVRKVLSMPQVNIVKKTEVQTGGFSKESILPKRNSDKLIAR
KKDWDPKKYGGFDSPTVAYSVLVVAKVEKGKSKKLKSVKELLGITIMERSSFEKNPI
DFLEAKGYKEVKKDLIIKLPKYSLFELENGRKRMLASAGELQKGNELALPSKYVNFL
YLASHYEKLKGSPEDNEQKQLFVEQHKHYLDEIIEQISEFSKRVILADANLDKVLSAY
NKHRDKPIREQAENIIHLFTLTNLGAPAAFKYFDTTIDRKRYTSTKEVLDATLIHQSIT
GLYETRIDLSQLGGDGGSGGSGGSGGSGGSGGSGGMDKKYSIGLAIGTNSVGWAVIT
DEYKVPSKKFKVLGNTDRHSIKKNLIGALLFDSGETAEATRLKRTARRRYTRRKNRI
CYLQEIFSNEMAKVDDSFFHRLEESFLVEEDKKHERHPIFGNIVDEVAYHEKYPTIYH
LRKKLVDSTDKADLRLIYLALAHMIKFRGHFLIEGDLNPDNSDVDKLFIQLVQTYNQ
LFEENPINASGVDAKAILSARLSKSRRLENLIAQLPGEKKNGLFGNLIALSLGLTPNFK
SNFDLAEDAKLQLSKDTYDDDLDNLLAQIGDQYADLFLAAKNLSDAILLSDILRVNT
EITKAPLSASMIKRYDEHHQDLTLLKALVRQQLPEKYKEIFFDQSKNGYAGYIDGGA
SQEEFYKFIKPILEKMDGTEELLVKLNREDLLRKQRTFDNGSIPHQIHLGELHAILRRQ
EDFYPFLKDNREKIEKILTFRIPYYVGPLARGNSRFAWMTRKSEETITPWNFEEVVDK
GASAQSFIERMTNFDKNLPNEKVLPKHSLLYEYFTVYNELTKVKYVTEGMRKPAFLS
GEQKKAIVDLLFKTNRKVTVKQLKEDYFKKIECFDSVEISGVEDRFNASLGTYHDLL
KIIKDKDFLDNEENEDILEDIVLTLTLFEDREMIEERLKTYAHLFDDKVMKQLKRRRY
TGWGRLSRKLINGIRDKQSGKTILDFLKSDGFANRNFMQLIHDDSLTFKEDIQKAQVS
GQGDSLHEHIANLAGSPAIKKGILQTVKVVDELVKVMGRHKPENIVIEMARENQTTQ
KGQKNSRERMKRIEEGIKELGSQILKEHPVENTQLQNEKLYLYYLQNGRDMYVDQE
LDINRLSDYDVDHIVPQSFLKDDSIDNKVLTRSDKNRGKSDNVPSEEVVKKMKNYW
RQLLNAKLITQRKFDNLTKAERGGLSELDKAGFIKRQLVETRQITKHVAQILDSRMN
TKYDENDKLIREVKVITLKSKLVSDFRKDFQFYKVREINNYHHAHDAYLNAVVGTA
LIKKYPKLESEFVYGDYKVYDVRKMIAKSEQSGGSKRTADGSEFEPKKKRKV
ABE8e-CP1028 monomer editor: NLS, linker, TadA*, CP1028
(SEQ ID NO: 388)
MKRTADGSEFESPKKKRKVSEVEFSHEYWMRHALTLAKRARDEREVPVGAVLVLN
NRVIGEGWNRAIGLHDPTAHAEIMALRQGGLVMQNYRLIDATLYVTFEPCVMCAGA
MIHSRIGRVVFGVRNSKRGAAGSLMNVLNYPGMNHRVEITEGILADECAALLCDFY
RMPRQVFNAQKKAQSSINSGGSSGGSSGSETPGTSESATPESSGGSSGGSEIGKATAK
YFFYSNIMNFFKTEITLANGEIRKRPLIETNGETGEIVWDKGRDFATVRKVLSMPQVN
IVKKTEVQTGGFSKESILPKRNSDKLIARKKDWDPKKYGGFDSPTVAYSVLVVAKVE
KGKSKKLKSVKELLGITIMERSSFEKNPIDFLEAKGYKEVKKDLIIKLPKYSLFELENG
RKRMLASAGELQKGNELALPSKYVNFLYLASHYEKLKGSPEDNEQKQLFVEQHKHY
LDEIIEQISEFSKRVILADANLDKVLSAYNKHRDKPIREQAENIIHLFTLTNLGAPAAFK
YFDTTIDRKRYTSTKEVLDATLIHQSITGLYETRIDLSQLGGDGGSGGSGGSGGSGGS
GGSGGMDKKYSIGLAIGTNSVGWAVITDEYKVPSKKFKVLGNTDRHSIKKNLIGALL
FDSGETAEATRLKRTARRRYTRRKNRICYLQEIFSNEMAKVDDSFFHRLEESFLVEED
KKHERHPIFGNIVDEVAYHEKYPTIYHLRKKLVDSTDKADLRLIYLALAHMIKFRGH
FLIEGDLNPDNSDVDKLFIQLVQTYNQLFEENPINASGVDAKAILSARLSKSRRLENLI
AQLPGEKKNGLFGNLIALSLGLTPNFKSNFDLAEDAKLQLSKDTYDDDLDNLLAQIG
DQYADLFLAAKNLSDAILLSDILRVNTEITKAPLSASMIKRYDEHHQDLTLLKALVRQ
QLPEKYKEIFFDQSKNGYAGYIDGGASQEEFYKFIKPILEKMDGTEELLVKLNREDLL
RKQRTFDNGSIPHQIHLGELHAILRRQEDFYPFLKDNREKIEKILTFRIPYYVGPLARG
NSRFAWMTRKSEETITPWNFEEVVDKGASAQSFIERMTNFDKNLPNEKVLPKHSLLY
EYFTVYNELTKVKYVTEGMRKPAFLSGEQKKAIVDLLFKTNRKVTVKQLKEDYFKK
IECFDSVEISGVEDRFNASLGTYHDLLKIIKDKDFLDNEENEDILEDIVLTLTLFEDREM
IEERLKTYAHLFDDKVMKQLKRRRYTGWGRLSRKLINGIRDKQSGKTILDFLKSDGF
ANRNFMQLIHDDSLTFKEDIQKAQVSGQGDSLHEHIANLAGSPAIKKGILQTVKVVD
ELVKVMGRHKPENIVIEMARENQTTQKGQKNSRERMKRIEEGIKELGSQILKEHPVE
NTQLQNEKLYLYYLQNGRDMYVDQELDINRLSDYDVDHIVPQSFLKDDSIDNKVLT
RSDKNRGKSDNVPSEEVVKKMKNYWRQLLNAKLITQRKFDNLTKAERGGLSELDK
AGFIKRQLVETRQITKHVAQILDSRMNTKYDENDKLIREVKVITLKSKLVSDFRKDFQ
FYKVREINNYHHAHDAYLNAVVGTALIKKYPKLESEFVYGDYKVYDVRKMIAKSEQ
SGGSKRTADGSEFEPKKKRKV
ABE8e-VRQR dimer editor: NLS, wtTadA, linker, TadA*, SpCas9-VRQR
(SEQ ID NO: 405)
MKRTADGSEFESPKKKRKVSEVEFSHEYWMRHALTLAKRAWDEREVPVGAVLVHN
NRVIGEGWNRPIGRHDPTAHAEIMALRQGGLVMQNYRLIDATLYVTLEPCVMCAGA
MIHSRIGRVVFGARDAKTGAAGSLMDVLHHPGMNHRVEITEGILADECAALLSDFFR
MRRQEIKAQKKAQSSTDSGGSSGGSSGSETPGTSESATPESSGGSSGGSSEVEFSHEY
WMRHALTLAKRARDEREVPVGAVLVLNNRVIGEGWNRAIGLHDPTAHAEIMALRQ
GGLVMQNYRLIDATLYVTFEPCVMCAGAMIHSRIGRVVFGVRNSKRGAAGSLMNV
LNYPGMNHRVEITEGILADECAALLCDFYRMPRQVFNAQKKAQSSINSGGSSGGSSG
SETPGTSESATPESSGGSSGGSDKKYSIGLAIGTNSVGWAVITDEYKVPSKKFKVLGN
TDRHSIKKNLIGALLFDSGETAEATRLKRTARRRYTRRKNRICYLQEIFSNEMAKVDD
SFFHRLEESFLVEEDKKHERHPIFGNIVDEVAYHEKYPTIYHLRKKLVDSTDKADLRL
IYLALAHMIKFRGHFLIEGDLNPDNSDVDKLFIQLVQTYNQLFEENPINASGVDAKAI
LSARLSKSRRLENLIAQLPGEKKNGLFGNLIALSLGLTPNFKSNFDLAEDAKLQLSKD
TYDDDLDNLLAQIGDQYADLFLAAKNLSDAILLSDILRVNTEITKAPLSASMIKRYDE
HHQDLTLLKALVRQQLPEKYKEIFFDQSKNGYAGYIDGGASQEEFYKFIKPILEKMD
GTEELLVKLNREDLLRKQRTFDNGSIPHQIHLGELHAILRRQEDFYPFLKDNREKIEKI
LTFRIPYYVGPLARGNSRFAWMTRKSEETITPWNFEEVVDKGASAQSFIERMTNFDK
NLPNEKVLPKHSLLYEYFTVYNELTKVKYVTEGMRKPAFLSGEQKKAIVDLLFKTNR
KVTVKQLKEDYFKKIECFDSVEISGVEDRFNASLGTYHDLLKIIKDKDFLDNEENEDI
LEDIVLTLTLFEDREMIEERLKTYAHLFDDKVMKQLKRRRYTGWGRLSRKLINGIRD
KQSGKTILDFLKSDGFANRNFMQLIHDDSLTFKEDIQKAQVSGQGDSLHEHIANLAG
SPAIKKGILQTVKVVDELVKVMGRHKPENIVIEMARENQTTQKGQKNSRERMKRIEE
GIKELGSQILKEHPVENTQLQNEKLYLYYLQNGRDMYVDQELDINRLSDYDVDHIVP
QSFLKDDSIDNKVLTRSDKNRGKSDNVPSEEVVKKMKNYWRQLLNAKLITQRKFDN
LTKAERGGLSELDKAGFIKRQLVETRQITKHVAQILDSRMNTKYDENDKLIREVKVIT
LKSKLVSDFRKDFQFYKVREINNYHHAHDAYLNAVVGTALIKKYPKLESEFVYGDY
KVYDVRKMIAKSEQEIGKATAKYFFYSNIMNFFKTEITLANGEIRKRPLIETNGETGEI
VWDKGRDFATVRKVLSMPQVNIVKKTEVQTGGFSKESILPKRNSDKLIARKKDWDP
KKYGGFVSPTVAYSVLVVAKVEKGKSKKLKSVKELLGITIMERSSFEKNPIDFLEAK
GYKEVKKDLIIKLPKYSLFELENGRKRMLASARELQKGNELALPSKYVNFLYLASHY
EKLKGSPEDNEQKQLFVEQHKHYLDEIIEQISEFSKRVILADANLDKVLSAYNKHRDK
PIREQAENIIHLFTLTNLGAPAAFKYFDTTIDRKQYRSTKEVLDATLIHQSITGLYETRI
DLSQLGGDSGGSKRTADGSEFEPKKKRKV
ABE8e-VRQR monomer editor: NLS, linker, TadA*, SpCas9-VRQR
(SEQ ID NO: 406)
MKRTADGSEFESPKKKRKVSEVEFSHEYWMRHALTLAKRARDEREVPVGAVLVLN
NRVIGEGWNRAIGLHDPTAHAEIMALRQGGLVMQNYRLIDATLYVTFEPCVMCAGA
MIHSRIGRVVFGVRNSKRGAAGSLMNVLNYPGMNHRVEITEGILADECAALLCDFY
RMPRQVFNAQKKAQSSINSGGSSGGSSGSETPGTSESATPESSGGSSGGSDKKYSIGL
AIGTNSVGWAVITDEYKVPSKKFKVLGNTDRHSIKKNLIGALLFDSGETAEATRLKR
TARRRYTRRKNRICYLQEIFSNEMAKVDDSFFHRLEESFLVEEDKKHERHPIFGNIVD
EVAYHEKYPTIYHLRKKLVDSTDKADLRLIYLALAHMIKFRGHFLIEGDLNPDNSDV
DKLFIQLVQTYNQLFEENPINASGVDAKAILSARLSKSRRLENLIAQLPGEKKNGLFG
NLIALSLGLTPNFKSNFDLAEDAKLQLSKDTYDDDLDNLLAQIGDQYADLFLAAKNL
SDAILLSDILRVNTEITKAPLSASMIKRYDEHHQDLTLLKALVRQQLPEKYKEIFFDQS
KNGYAGYIDGGASQEEFYKFIKPILEKMDGTEELLVKLNREDLLRKQRTFDNGSIPHQ
IHLGELHAILRRQEDFYPFLKDNREKIEKILTFRIPYYVGPLARGNSRFAWMTRKSEET
ITPWNFEEVVDKGASAQSFIERMTNFDKNLPNEKVLPKHSLLYEYFTVYNELTKVKY
VTEGMRKPAFLSGEQKKAIVDLLFKTNRKVTVKQLKEDYFKKIECFDSVEISGVEDR
FNASLGTYHDLLKIIKDKDFLDNEENEDILEDIVLTLTLFEDREMIEERLKTYAHLFDD
KVMKQLKRRRYTGWGRLSRKLINGIRDKQSGKTILDFLKSDGFANRNFMQLIHDDSL
TFKEDIQKAQVSGQGDSLHEHIANLAGSPAIKKGILQTVKVVDELVKVMGRHKPENI
VIEMARENQTTQKGQKNSRERMKRIEEGIKELGSQILKEHPVENTQLQNEKLYLYYL
QNGRDMYVDQELDINRLSDYDVDHIVPQSFLKDDSIDNKVLTRSDKNRGKSDNVPS
EEVVKKMKNYWRQLLNAKLITQRKFDNLTKAERGGLSELDKAGFIKRQLVETRQIT
KHVAQILDSRMNTKYDENDKLIREVKVITLKSKLVSDFRKDFQFYKVREINNYHHAH
DAYLNAVVGTALIKKYPKLESEFVYGDYKVYDVRKMIAKSEQEIGKATAKYFFYSNI
MNFFKTEITLANGEIRKRPLIETNGETGEIVWDKGRDFATVRKVLSMPQVNIVKKTEV
QTGGFSKESILPKRNSDKLIARKKDWDPKKYGGFVSPTVAYSVLVVAKVEKGKSKK
LKSVKELLGITIMERSSFEKNPIDFLEAKGYKEVKKDLIIKLPKYSLFELENGRKRMLA
SARELQKGNELALPSKYVNFLYLASHYEKLKGSPEDNEQKQLFVEQHKHYLDEIIEQI
SEFSKRVILADANLDKVLSAYNKHRDKPIREQAENIIHLFTLTNLGAPAAFKYFDTTID
RKQYRSTKEVLDATLIHQSITGLYETRIDLSQLGGDSGGSKRTADGSEFEPKKKRKV
ABE8e-NG-CP1041 dimer editor: NLS, wtTadA, linker, TadA*, SpCas9-NG-CP1041
(SEQ ID NO: 396)
MKRTADGSEFESPKKKRKVSEVEFSHEYWMRHALTLAKRAWDEREVPVGAVLVHN
NRVIGEGWNRPIGRHDPTAHAEIMALRQGGLVMQNYRLIDATLYVTLEPCVMCAGA
MIHSRIGRVVFGARDAKTGAAGSLMDVLHHPGMNHRVEITEGILADECAALLSDFFR
MRRQEIKAQKKAQSSTDSGGSSGGSSGSETPGTSESATPESSGGSSGGSSEVEFSHEY
WMRHALTLAKRARDEREVPVGAVLVLNNRVIGEGWNRAIGLHDPTAHAEIMALRQ
GGLVMQNYRLIDATLYVTFEPCVMCAGAMIHSRIGRVVFGVRNSKRGAAGSLMNV
LNYPGMNHRVEITEGILADECAALLCDFYRMPRQVFNAQKKAQSSINSGGSSGGSSG
SETPGTSESATPESSGGSSGGSNIMNFFKTEITLANGEIRKRPLIETNGETGEIVWDKGR
DFATVRKVLSMPQVNIVKKTEVQTGGFSKESIRPKRNSDKLIARKKDWDPKKYGGF
VSPTVAYSVLVVAKVEKGKSKKLKSVKELLGITIMERSSFEKNPIDFLEAKGYKEVK
KDLIIKLPKYSLFELENGRKRMLASARFLQKGNELALPSKYVNFLYLASHYEKLKGS
PEDNEQKQLFVEQHKHYLDEIIEQISEFSKRVILADANLDKVLSAYNKHRDKPIREQA
ENIIHLFTLTNLGAPRAFKYFDTTIDRKVYRSTKEVLDATLIHQSITGLYETRIDLSQLG
GDGGSGGSGGSGGSGGSGGSGGDKKYSIGLAIGTNSVGWAVITDEYKVPSKKFKVL
GNTDRHSIKKNLIGALLFDSGETAEATRLKRTARRRYTRRKNRICYLQEIFSNEMAKV
DDSFFHRLEESFLVEEDKKHERHPIFGNIVDEVAYHEKYPTIYHLRKKLVDSTDKADL
RLIYLALAHMIKFRGHFLIEGDLNPDNSDVDKLFIQLVQTYNQLFEENPINASGVDAK
AILSARLSKSRRLENLIAQLPGEKKNGLFGNLIALSLGLTPNFKSNFDLAEDAKLQLSK
DTYDDDLDNLLAQIGDQYADLFLAAKNLSDAILLSDILRVNTEITKAPLSASMIKRYD
EHHQDLTLLKALVRQQLPEKYKEIFFDQSKNGYAGYIDGGASQEEFYKFIKPILEKM
DGTEELLVKLNREDLLRKQRTFDNGSIPHQIHLGELHAILRRQEDFYPFLKDNREKIE
KILTFRIPYYVGPLARGNSRFAWMTRKSEETITPWNFEEVVDKGASAQSFIERMTNFD
KNLPNEKVLPKHSLLYEYFTVYNELTKVKYVTEGMRKPAFLSGEQKKAIVDLLFKT
NRKVTVKQLKEDYFKKIECFDSVEISGVEDRFNASLGTYHDLLKIIKDKDFLDNEENE
DILED IVLTLTLFEDREMIEERLKTYAHLFDDKVMKQLKRRRYTGWGRLSRKLINGIR
DKQSGKTILDFLKSDGFANRNFMQLIHDDSLTFKEDIQKAQVSGQGDSLHEHIANLA
GSPAIKKGILQTVKVVDELVKVMGRHKPENIVIEMARENQTTQKGQKNSRERMKRIE
EGIKELGSQILKEHPVENTQLQNEKLYLYYLQNGRDMYVDQELDINRLSDYDVDHIV
PQSFLKDDSIDNKVLTRSDKNRGKSDNVPSEEVVKKMKNYWRQLLNAKLITQRKFD
NLTKAERGGLSELDKAGFIKRQLVETRQITKHVAQILDSRMNTKYDENDKLIREVKV
ITLKSKLVSDFRKDFQFYKVREINNYHHAHDAYLNAVVGTALIKKYPKLESEFVYGD
YKVYDVRKMIAKSEQEIGKATAKYFFYSSGGSKRTADGSEFEPKKKRKV
ABE8e-NG-CP1041 monomer editor: NLS, linker, TadA*, SpCas9-NG-CP1041
(SEQ ID NO: 397)
MKRTADGSEFESPKKKRKVSEVEFSHEYWMRHALTLAKRARDEREVPVGAVLVLN
NRVIGEGWNRAIGLHDPTAHAEIMALRQGGLVMQNYRLIDATLYVTFEPCVMCAGA
MIHSRIGRVVFGVRNSKRGAAGSLMNVLNYPGMNHRVEITEGILADECAALLCDFY
RMPRQVFNAQKKAQSSINSGGSSGGSSGSETPGTSESATPESSGGSSGGSNIMNFFKT
EITLANGEIRKRPLIETNGETGEIVWDKGRDFATVRKVLSMPQVNIVKKTEVQTGGFS
KESIRPKRNSDKLIARKKDWDPKKYGGFVSPTVAYSVLVVAKVEKGKSKKLKSVKE
LLGITIMERSSFEKNPIDFLEAKGYKEVKKDLIIKLPKYSLFELENGRKRMLASARFLQ
KGNELALPSKYVNFLYLASHYEKLKGSPEDNEQKQLFVEQHKHYLDEIIEQISEFSKR
VILADANLDKVLSAYNKHRDKPIREQAENIIHLFTLTNLGAPRAFKYFDTTIDRKVYR
STKEVLDATLIHQSITGLYETRIDLSQLGGDGGSGGSGGSGGSGGSGGSGGDKKYSIG
LAIGTNSVGWAVITDEYKVPSKKFKVLGNTDRHSIKKNLIGALLFDSGETAEATRLK
RTARRRYTRRKNRICYLQEIFSNEMAKVDDSFFHRLEESFLVEEDKKHERHPIFGNIV
DEVAYHEKYPTIYHLRKKLVDSTDKADLRLIYLALAHMIKFRGHFLIEGDLNPDNSD
VDKLFIQLVQTYNQLFEENPINASGVDAKAILSARLSKSRRLENLIAQLPGEKKNGLF
GNLIALSLGLTPNFKSNFDLAEDAKLQLSKDTYDDDLDNLLAQIGDQYADLFLAAKN
LSDAILLSDILRVNTEITKAPLSASMIKRYDEHHQDLTLLKALVRQQLPEKYKEIFFDQ
SKNGYAGYIDGGASQEEFYKFIKPILEKMDGTEELLVKLNREDLLRKQRTFDNGSIPH
QIHLGELHAILRRQEDFYPFLKDNREKIEKILTFRIPYYVGPLARGNSRFAWMTRKSEE
TITPWNFEEVVDKGASAQSFIERMTNFDKNLPNEKVLPKHSLLYEYFTVYNELTKVK
YVTEGMRKPAFLSGEQKKAIVDLLFKTNRKVTVKQLKEDYFKKIECFDSVEISGVED
RFNASLGTYHDLLKIIKDKDFLDNEENEDILEDIVLTLTLFEDREMIEERLKTYAHLFD
DKVMKQLKRRRYTGWGRLSRKLINGIRDKQSGKTILDFLKSDGFANRNFMQLIHDD
SLTFKEDIQKAQVSGQGDSLHEHIANLAGSPAIKKGILQTVKVVDELVKVMGRHKPE
NIVIEMARENQTTQKGQKNSRERMKRIEEGIKELGSQILKEHPVENTQLQNEKLYLY
YLQNGRDMYVDQELDINRLSDYDVDHIVPQSFLKDDSIDNKVLTRSDKNRGKSDNV
PSEEVVKKMKNYWRQLLNAKLITQRKFDNLTKAERGGLSELDKAGFIKRQLVETRQI
TKHVAQILDSRMNTKYDENDKLIREVKVITLKSKLVSDFRKDFQFYKVREINNYHHA
HDAYLNAVVGTALIKKYPKLESEFVYGDYKVYDVRKMIAKSEQEIGKATAKYFFYS
SGGSKRTADGSEFEPKKKRKV
ABESe-iSpyMac dimer editor: NLS, wtTadA, linker, TadA*, SpCas9-iSpyMac
(SEQ ID NO: 407)
MKRTADGSEFESPKKKRKVSEVEFSHEYWMRHALTLAKRAWDEREVPVGAVLVHN
NRVIGEGWNRPIGRHDPTAHAEIMALRQGGLVMQNYRLIDATLYVTLEPCVMCAGA
MIHSRIGRVVFGARDAKTGAAGSLMDVLHHPGMNHRVEITEGILADECAALLSDFFR
MRRQEIKAQKKAQSSTDSGGSSGGSSGSETPGTSESATPESSGGSSGGSSEVEFSHEY
WMRHALTLAKRARDEREVPVGAVLVLNNRVIGEGWNRAIGLHDPTAHAEIMALRQ
GGLVMQNYRLIDATLYVTFEPCVMCAGAMIHSRIGRVVFGVRNSKRGAAGSLMNV
LNYPGMNHRVEITEGILADECAALLCDFYRMPRQVFNAQKKAQSSINSGGSSGGSSG
SETPGTSESATPESSGGSSGGSDKKYSIGLDIGTNSVGWAVITDEYKVPSKKFKVLGN
TDRHSIKKNLIGALLFDSGETAEATRLKRTARRRYTRRKNRICYLQEIFSNEMAKVDD
SFFHRLEESFLVEEDKKHERHPIFGNIVDEVAYHEKYPTIYHLRKKLVDSTDKADLRL
IYLALAHMIKFRGHFLIEGDLNPDNSDVDKLFIQLVQTYNQLFEENPINASGVDAKAI
LSARLSKSRRLENLIAQLPGEKKNGLFGNLIALSLGLTPNFKSNFDLAEDAKLQLSKD
TYDDDLDNLLAQIGDQYADLFLAAKNLSDAILLSDILRVNTEITKAPLSASMIKRYDE
HHQDLTLLKALVRQQLPEKYKEIFFDQSKNGYAGYIDGGASQEEFYKFIKPILEKMD
GTEELLVKLNREDLLRKQRTFDNGSIPHQIHLGELHAILRRQEDFYPFLKDNREKIEKI
LTFRIPYYVGPLARGNSRFAWMTRKSEETITPWNFEEVVDKGASAQSFIERMTNFDK
NLPNEKVLPKHSLLYEYFTVYNELTKVKYVTEGMRKPAFLSGEQKKAIVDLLFKTNR
KVTVKQLKEDYFKKIECFDSVEISGVEDRFNASLGTYHDLLKIIKDKDFLDNEENEDI
LEDIVLTLTLFEDREMIEERLKTYAHLFDDKVMKQLKRRRYTGWGRLSRKLINGIRD
KQSGKTILDFLKSDGFANRNFMQLIHDDSLTFKEDIQKAQVSGQGDSLHEHIANLAG
SPAIKKGILQTVKVVDELVKVMGRHKPENIVIEMARENQTTQKGQKNSRERMKRIEE
GIKELGSQILKEHPVENTQLQNEKLYLYYLQNGRDMYVDQELDINRLSDYDVDHIVP
QSFLKDDSIDNKVLTRSDKNRGKSDNVPSEEVVKKMKNYWRQLLNAKLITQRKFDN
LTKAERGGLSELDKAGFIKRQLVETRQITKHVAQILDSRMNTKYDENDKLIREVKVIT
LKSKLVSDFRKDFQFYKVREINNYHHAHDAYLNAVVGTALIKKYPKLESEFVYGDY
KVYDVRKMIAKSEQEIGKATAKYFFYSNIMNFFKTEITLANGEIRKRPLIETNGETGEI
VWDKGRDFATVRKVLSMPQVNIVKKTESGGSKRTADGSEFEPKKKRKV
ABESe-iSpyMac monomer editor: NLS, linker, TadA*, SpCas9-iSpyMac
(SEQ ID NO: 408)
MKRTADGSEFESPKKKRKVSEVEFSHEYWMRHALTLAKRARDEREVPVGAVLVLN
NRVIGEGWNRAIGLHDPTAHAEIMALRQGGLVMQNYRLIDATLYVTFEPCVMCAGA
MIHSRIGRVVFGVRNSKRGAAGSLMNVLNYPGMNHRVEITEGILADECAALLCDFY
RMPRQVFNAQKKAQSSINSGGSSGGSSGSETPGTSESATPESSGGSSGGSDKKYSIGL
DIGTNSVGWAVITDEYKVPSKKFKVLGNTDRHSIKKNLIGALLFDSGETAEATRLKR
TARRRYTRRKNRICYLQEIFSNEMAKVDDSFFHRLEESFLVEEDKKHERHPIFGNIVD
EVAYHEKYPTIYHLRKKLVDSTDKADLRLIYLALAHMIKFRGHFLIEGDLNPDNSDV
DKLFIQLVQTYNQLFEENPINASGVDAKAILSARLSKSRRLENLIAQLPGEKKNGLFG
NLIALSLGLTPNFKSNFDLAEDAKLQLSKDTYDDDLDNLLAQIGDQYADLFLAAKNL
SDAILLSDILRVNTEITKAPLSASMIKRYDEHHQDLTLLKALVRQQLPEKYKEIFFDQS
KNGYAGYIDGGASQEEFYKFIKPILEKMDGTEELLVKLNREDLLRKQRTFDNGSIPHQ
IHLGELHAILRRQEDFYPFLKDNREKIEKILTFRIPYYVGPLARGNSRFAWMTRKSEET
ITPWNFEEVVDKGASAQSFIERMTNFDKNLPNEKVLPKHSLLYEYFTVYNELTKVKY
VTEGMRKPAFLSGEQKKAIVDLLFKTNRKVTVKQLKEDYFKKIECFDSVEISGVEDR
FNASLGTYHDLLKIIKDKDFLDNEENEDILEDIVLTLTLFEDREMIEERLKTYAHLFDD
KVMKQLKRRRYTGWGRLSRKLINGIRDKQSGKTILDFLKSDGFANRNFMQLIHDDSL
TFKEDIQKAQVSGQGDSLHEHIANLAGSPAIKKGILQTVKVVDELVKVMGRHKPENI
VIEMARENQTTQKGQKNSRERMKRIEEGIKELGSQILKEHPVENTQLQNEKLYLYYL
QNGRDMYVDQELDINRLSDYDVDHIVPQSFLKDDSIDNKVLTRSDKNRGKSDNVPS
EEVVKKMKNYWRQLLNAKLITQRKFDNLTKAERGGLSELDKAGFIKRQLVETRQIT
KHVAQILDSRMNTKYDENDKLIREVKVITLKSKLVSDFRKDFQFYKVREINNYHHAH
DAYLNAVVGTALIKKYPKLESEFVYGDYKVYDVRKMIAKSEQEIGKATAKYFFYSNI
MNFFKTEITLANGEIRKRPLIETNGETGEIVWDKGRDFATVRKVLSMPQVNIVKKTES
GGSKRTADGSEFEPKKKRKV

[0397] In some embodiments, exemplary ABEs for use in the present disclosure include those from Gaudelli et al. Nature Biotechnology (2020) 38, 892-900, including, but not limited to, base editors of any of the following amino acid sequences, and any base editors comprising sequences that are at least 85%, at least 90%, at least 95%, at least 98%, at least 99%, or at least 99.5% identical to any of the following amino acid sequences:

ABE8.8-m
(SEQ ID NO: 409)
MSEVEFSHEYWMRHALTLAKRARDEREVPVGAVLVLNNRV
IGEGWNRAIGLHDPTAHAEIMALRQGGLVMQNYRLIDATL
YVTFEPCVMCAGAMIHSRIGRVVFGVRNAKTGAAGSLMDV
LHHPGMNHRVEITEGILADECAALLCRFFRMPRRVFNAQK
KAQSSTDSGGSSGGSSGSETPGTSESATPESSGGSSGGSD
KKYSIGLAIGTNSVGWAVITDEYKVPSKKFKVLGNTDRHS
IKKNLIGALLFDSGETAEATRLKRTARRRYTRRKNRICYL
QEIFSNEMAKVDDSFFHRLEESFLVEEDKKHERHPIFGNI
VDEVAYHEKYPTIYHLRKKLVDSTDKADLRLIYLALAHMI
KFRGHFLIEGDLNPDNSDVDKLFIQLVQTYNQLFEENPIN
ASGVDAKAILSARLSKSRRLENLIAQLPGEKKNGLFGNLI
ALSLGLTPNFKSNFDLAEDAKLQLSKDTYDDDLDNLLAQI
GDQYADLFLAAKNLSDAILLSDILRVNTEITKAPLSASMI
KRYDEHHQDLTLLKALVRQQLPEKYKEIFFDQSKNGYAGY
IDGGASQEEFYKFIKPILEKMDGTEELLVKLNREDLLRKQ
RTFDNGSIPHQIHLGELHAILRRQEDFYPFLKDNREKIEK
ILTFRIPYYVGPLARGNSRFAWMTRKSEETITPWNFEEVV
DKGASAQSFIERMTNFDKNLPNEKVLPKHSLLYEYFTVYN
ELTKVKYVTEGMRKPAFLSGEQKKAIVDLLFKTNRKVTVK
QLKEDYFKKIECFDSVEISGVEDRFNASLGTYHDLLKIIK
DKDFLDNEENEDILEDIVLTLTLFEDREMIEERLKTYAHL
FDDKVMKQLKRRRYTGWGRLSRKLINGIRDKQSGKTILDF
LKSDGFANRNFMQLIHDDSLTFKEDIQKAQVSGQGDSLHE
HIANLAGSPAIKKGILQTVKVVDELVKVMGRHKPENIVIE
MARENQTTQKGQKNSRERMKRIEEGIKELGSQILKEHPVE
NTQLQNEKLYLYYLQNGRDMYVDQELDINRLSDYDVDHIV
PQSFLKDDSIDNKVLTRSDKNRGKSDNVPSEEVVKKMKNY
WRQLLNAKLITQRKFDNLTKAERGGLSELDKAGFIKRQLV
ETRQITKHVAQILDSRMNTKYDENDKLIREVKVITLKSKL
VSDFRKDFQFYKVREINNYHHAHDAYLNAVVGTALIKKYP
KLESEFVYGDYKVYDVRKMIAKSEQEIGKATAKYFFYSNI
MNFFKTEITLANGEIRKRPLIETNGETGEIVWDKGRDFAT
VRKVLSMPQVNIVKKTEVQTGGFSKESILPKRNSDKLIAR
KKDWDPKKYGGFDSPTVAYSVLVVAKVEKGKSKKLKSVKE
LLGITIMERSSFEKNPIDFLEAKGYKEVKKDLIIKLPKYS
LFELENGRKRMLASAGELQKGNELALPSKYVNFLYLASHY
EKLKGSPEDNEQKQLFVEQHKHYLDEIIEQISEFSKRVIL
ADANLDKVLSAYNKHRDKPIREQAENIIHLFTLTNLGAPA
AFKYFDTTIDRKRYTSTKEVLDATLIHQSITGLYETRIDL
SQLGGDEGADKRTADGSEFESPKKKRKV
ABE8.13-m
(SEQ ID NO: 410)
MSEVEFSHEYWMRHALTLAKRARDEREVPVGAVLVLNNRV
IGEGWNRAIGLHDPTAHAEIMALRQGGLVMQNYRLYDATL
YVTFEPCVMCAGAMIHSRIGRVVFGVRNAKTGAAGSLMDV
LHHPGMNHRVEITEGILADECAALLCRFFRMPRRVFNAQK
KAQSSTDSGGSSGGSSGSETPGTSESATPESSGGSSGGSD
KKYSIGLAIGTNSVGWAVITDEYKVPSKKFKVLGNTDRHS
IKKNLIGALLFDSGETAEATRLKRTARRRYTRRKNRICYL
QEIFSNEMAKVDDSFFHRLEESFLVEEDKKHERHPIFGNI
VDEVAYHEKYPTIYHLRKKLVDSTDKADLRLIYLALAHMI
KFRGHFLIEGDLNPDNSDVDKLFIQLVQTYNQLFEENPIN
ASGVDAKAILSARLSKSRRLENLIAQLPGEKKNGLFGNLI
ALSLGLTPNFKSNFDLAEDAKLQLSKDTYDDDLDNLLAQI
GDQYADLFLAAKNLSDAILLSDILRVNTEITKAPLSASMI
KRYDEHHQDLTLLKALVRQQLPEKYKEIFFDQSKNGYAGY
IDGGASQEEFYKFIKPILEKMDGTEELLVKLNREDLLRKQ
RTFDNGSIPHQIHLGELHAILRRQEDFYPFLKDNREKIEK
ILTFRIPYYVGPLARGNSRFAWMTRKSEETITPWNFEEVV
DKGASAQSFIERMTNFDKNLPNEKVLPKHSLLYEYFTVYN
ELTKVKYVTEGMRKPAFLSGEQKKAIVDLLFKTNRKVTVK
QLKEDYFKKIECFDSVEISGVEDRFNASLGTYHDLLKIIK
DKDFLDNEENEDILEDIVLTLTLFEDREMIEERLKTYAHL
FDDKVMKQLKRRRYTGWGRLSRKLINGIRDKQSGKTILDF
LKSDGFANRNFMQLIHDDSLTFKEDIQKAQVSGQGDSLHE
HIANLAGSPAIKKGILQTVKVVDELVKVMGRHKPENIVIE
MARENQTTQKGQKNSRERMKRIEEGIKELGSQILKEHPVE
NTQLQNEKLYLYYLQNGRDMYVDQELDINRLSDYDVDHIV
PQSFLKDDSIDNKVLTRSDKNRGKSDNVPSEEVVKKMKNY
WRQLLNAKLITQRKFDNLTKAERGGLSELDKAGFIKRQLV
ETRQITKHVAQILDSRMNTKYDENDKLIREVKVITLKSKL
VSDFRKDFQFYKVREINNYHHAHDAYLNAVVGTALIKKYP
KLESEFVYGDYKVYDVRKMIAKSEQEIGKATAKYFFYSNI
MNFFKTEITLANGEIRKRPLIETNGETGEIVWDKGRDFAT
VRKVLSMPQVNIVKKTEVQTGGFSKESILPKRNSDKLIAR
KKDWDPKKYGGFDSPTVAYSVLVVAKVEKGKSKKLKSVKE
LLGITIMERSSFEKNPIDFLEAKGYKEVKKDLIIKLPKYS
LFELENGRKRMLASAGELQKGNELALPSKYVNFLYLASHY
EKLKGSPEDNEQKQLFVEQHKHYLDEIIEQISEFSKRVIL
ADANLDKVLSAYNKHRDKPIREQAENIIHLFTLTNLGAPA
AFKYFDTTIDRKRYTSTKEVLDATLIHQSITGLYETRIDL
SQLGGDEGADKRTADGSEFESPKKKRKV
ABE8.17-m
(SEQ ID NO: 411)
MSEVEFSHEYWMRHALTLAKRARDEREVPVGAVLVLNNRV
IGEGWNRAIGLHDPTAHAEIMALRQGGLVMQNYRLIDATL
YSTFEPCVMCAGAMIHSRIGRVVFGVRNAKTGAAGSLMDV
LHYPGMNHRVEITEGILADECAALLCYFFRMPRRVFNAQK
KAQSSTDSGGSSGGSSGSETPGTSESATPESSGGSSGGSD
KKYSIGLAIGTNSVGWAVITDEYKVPSKKFKVLGNTDRHS
IKKNLIGALLFDSGETAEATRLKRTARRRYTRRKNRICYL
QEIFSNEMAKVDDSFFHRLEESFLVEEDKKHERHPIFGNI
VDEVAYHEKYPTIYHLRKKLVDSTDKADLRLIYLALAHMI
KFRGHFLIEGDLNPDNSDVDKLFIQLVQTYNQLFEENPIN
ASGVDAKAILSARLSKSRRLENLIAQLPGEKKNGLFGNLI
ALSLGLTPNFKSNFDLAEDAKLQLSKDTYDDDLDNLLAQI
GDQYADLFLAAKNLSDAILLSDILRVNTEITKAPLSASMI
KRYDEHHQDLTLLKALVRQQLPEKYKEIFFDQSKNGYAGY
IDGGASQEEFYKFIKPILEKMDGTEELLVKLNREDLLRKQ
RTFDNGSIPHQIHLGELHAILRRQEDFYPFLKDNREKIEK
ILTFRIPYYVGPLARGNSRFAWMTRKSEETITPWNFEEVV
DKGASAQSFIERMTNFDKNLPNEKVLPKHSLLYEYFTVYN
ELTKVKYVTEGMRKPAFLSGEQKKAIVDLLFKTNRKVTVK
QLKEDYFKKIECFDSVEISGVEDRFNASLGTYHDLLKIIK
DKDFLDNEENEDILEDIVLTLTLFEDREMIEERLKTYAHL
FDDKVMKQLKRRRYTGWGRLSRKLINGIRDKQSGKTILDF
LKSDGFANRNFMQLIHDDSLTFKEDIQKAQVSGQGDSLHE
HIANLAGSPAIKKGILQTVKVVDELVKVMGRHKPENIVIE
MARENQTTQKGQKNSRERMKRIEEGIKELGSQILKEHPVE
NTQLQNEKLYLYYLQNGRDMYVDQELDINRLSDYDVDHIV
PQSFLKDDSIDNKVLTRSDKNRGKSDNVPSEEVVKKMKNY
WRQLLNAKLITQRKFDNLTKAERGGLSELDKAGFIKRQLV
ETRQITKHVAQILDSRMNTKYDENDKLIREVKVITLKSKL
VSDFRKDFQFYKVREINNYHHAHDAYLNAVVGTALIKKYP
KLESEFVYGDYKVYDVRKMIAKSEQEIGKATAKYFFYSNI
MNFFKTEITLANGEIRKRPLIETNGETGEIVWDKGRDFAT
VRKVLSMPQVNIVKKTEVQTGGFSKESILPKRNSDKLIAR
KKDWDPKKYGGFDSPTVAYSVLVVAKVEKGKSKKLKSVKE
LLGITIMERSSFEKNPIDFLEAKGYKEVKKDLIIKLPKYS
LFELENGRKRMLASAGELQKGNELALPSKYVNFLYLASHY
EKLKGSPEDNEQKQLFVEQHKHYLDEIIEQISEFSKRVIL
ADANLDKVLSAYNKHRDKPIREQAENIIHLFTLTNLGAPA
AFKYFDTTIDRKRYTSTKEVLDATLIHQSITGLYETRIDL
SQLGGDEGADKRTADGSEFESPKKKRKV
ABE8.20-m
(SEQ ID NO: 412)
MSEVEFSHEYWMRHALTLAKRARDEREVPVGAVLVLNNRV
IGEGWNRAIGLHDPTAHAEIMALRQGGLVMQNYRLYDATL
YSTFEPCVMCAGAMIHSRIGRVVFGVRNAKTGAAGSLMDV
LHHPGMNHRVEITEGILADECAALLCRFFRMPRRVFNAQK
KAQSSTDSGGSSGGSSGSETPGTSESATPESSGGSSGGSD
KKYSIGLAIGTNSVGWAVITDEYKVPSKKFKVLGNTDRHS
IKKNLIGALLFDSGETAEATRLKRTARRRYTRRKNRICYL
QEIFSNEMAKVDDSFFHRLEESFLVEEDKKHERHPIFGNI
VDEVAYHEKYPTIYHLRKKLVDSTDKADLRLIYLALAHMI
KFRGHFLIEGDLNPDNSDVDKLFIQLVQTYNQLFEENPIN
ASGVDAKAILSARLSKSRRLENLIAQLPGEKKNGLFGNLI
ALSLGLTPNFKSNFDLAEDAKLQLSKDTYDDDLDNLLAQI
GDQYADLFLAAKNLSDAILLSDILRVNTEITKAPLSASMI
KRYDEHHQDLTLLKALVRQQLPEKYKEIFFDQSKNGYAGY
IDGGASQEEFYKFIKPILEKMDGTEELLVKLNREDLLRKQ
RTFDNGSIPHQIHLGELHAILRRQEDFYPFLKDNREKIEK
ILTFRIPYYVGPLARGNSRFAWMTRKSEETITPWNFEEVV
DKGASAQSFIERMTNFDKNLPNEKVLPKHSLLYEYFTVYN
ELTKVKYVTEGMRKPAFLSGEQKKAIVDLLFKTNRKVTVK
QLKEDYFKKIECFDSVEISGVEDRFNASLGTYHDLLKIIK
DKDFLDNEENEDILEDIVLTLTLFEDREMIEERLKTYAHL
FDDKVMKQLKRRRYTGWGRLSRKLINGIRDKQSGKTILDF
LKSDGFANRNFMQLIHDDSLTFKEDIQKAQVSGQGDSLHE
HIANLAGSPAIKKGILQTVKVVDELVKVMGRHKPENIVIE
MARENQTTQKGQKNSRERMKRIEEGIKELGSQILKEHPVE
NTQLQNEKLYLYYLQNGRDMYVDQELDINRLSDYDVDHIV
PQSFLKDDSIDNKVLTRSDKNRGKSDNVPSEEVVKKMKNY
WRQLLNAKLITQRKFDNLTKAERGGLSELDKAGFIKRQLV
ETRQITKHVAQILDSRMNTKYDENDKLIREVKVITLKSKL
VSDFRKDFQFYKVREINNYHHAHDAYLNAVVGTALIKKYP
KLESEFVYGDYKVYDVRKMIAKSEQEIGKATAKYFFYSNI
MNFFKTEITLANGEIRKRPLIETNGETGEIVWDKGRDFAT
VRKVLSMPQVNIVKKTEVQTGGFSKESILPKRNSDKLIAR
KKDWDPKKYGGFDSPTVAYSVLVVAKVEKGKSKKLKSVKE
LLGITIMERSSFEKNPIDFLEAKGYKEVKKDLIIKLPKYS
LFELENGRKRMLASAGELQKGNELALPSKYVNFLYLASHY
EKLKGSPEDNEQKQLFVEQHKHYLDEIIEQISEFSKRVIL
ADANLDKVLSAYNKHRDKPIREQAENIIHLFTLTNLGAPA
AFKYFDTTIDRKRYTSTKEVLDATLIHQSITGLYETRIDL
SQLGGDEGADKRTADGSEFESPKKKRKV
ABE8.8-d
(SEQ ID NO: 413)
MSEVEFSHEYWMRHALTLAKRAWDEREVPVGAVLVHNNRV
IGEGWNRPIGRHDPTAHAEIMALRQGGLVMQNYRLIDATL
YVTLEPCVMCAGAMIHSRIGRVVFGARDAKTGAAGSLMDV
LHHPGMNHRVEITEGILADECAALLSDFFRMRRQEIKAQK
KAQSSTDSGGSSGGSSGSETPGTSESATPESSGGSSGGSS
EVEFSHEYWMRHALTLAKRARDEREVPVGAVLVLNNRVIG
EGWNRAIGLHDPTAHAEIMALRQGGLVMQNYRLIDATLYV
TFEPCVMCAGAMIHSRIGRVVFGVRNAKTGAAGSLMDVLH
HPGMNHRVEITEGILADECAALLCRFFRMPRRVFNAQKKA
QSSTDSGGSSGGSSGSETPGTSESATPESSGGSSGGSDKK
YSIGLAIGTNSVGWAVITDEYKVPSKKFKVLGNTDRHSIK
KNLIGALLFDSGETAEATRLKRTARRRYTRRKNRICYLQE
IFSNEMAKVDDSFFHRLEESFLVEEDKKHERHPIFGNIVD
EVAYHEKYPTIYHLRKKLVDSTDKADLRLIYLALAHMIKF
RGHFLIEGDLNPDNSDVDKLFIQLVQTYNQLFEENPINAS
GVDAKAILSARLSKSRRLENLIAQLPGEKKNGLFGNLIAL
SLGLTPNFKSNFDLAEDAKLQLSKDTYDDDLDNLLAQIGD
QYADLFLAAKNLSDAILLSDILRVNTEITKAPLSASMIKR
YDEHHQDLTLLKALVRQQLPEKYKEIFFDQSKNGYAGYID
GGASQEEFYKFIKPILEKMDGTEELLVKLNREDLLRKQRT
FDNGSIPHQIHLGELHAILRRQEDFYPFLKDNREKIEKIL
TFRIPYYVGPLARGNSRFAWMTRKSEETITPWNFEEVVDK
GASAQSFIERMTNFDKNLPNEKVLPKHSLLYEYFTVYNEL
TKVKYVTEGMRKPAFLSGEQKKAIVDLLFKTNRKVTVKQL
KEDYFKKIECFDSVEISGVEDRFNASLGTYHDLLKIIKDK
DFLDNEENEDILEDIVLTLTLFEDREMIEERLKTYAHLFD
DKVMKQLKRRRYTGWGRLSRKLINGIRDKQSGKTILDFLK
SDGFANRNFMQLIHDDSLTFKEDIQKAQVSGQGDSLHEHI
ANLAGSPAIKKGILQTVKVVDELVKVMGRHKPENIVIEMA
RENQTTQKGQKNSRERMKRIEEGIKELGSQILKEHPVENT
QLQNEKLYLYYLQNGRDMYVDQELDINRLSDYDVDHIVPQ
SFLKDDSIDNKVLTRSDKNRGKSDNVPSEEVVKKMKNYWR
QLLNAKLITQRKFDNLTKAERGGLSELDKAGFIKRQLVET
RQITKHVAQILDSRMNTKYDENDKLIREVKVITLKSKLVS
DFRKDFQFYKVREINNYHHAHDAYLNAVVGTALIKKYPKL
ESEFVYGDYKVYDVRKMIAKSEQEIGKATAKYFFYSNIMN
FFKTEITLANGEIRKRPLIETNGETGEIVWDKGRDFATVR
KVLSMPQVNIVKKTEVQTGGFSKESILPKRNSDKLIARKK
DWDPKKYGGFDSPTVAYSVLVVAKVEKGKSKKLKSVKELL
GITIMERSSFEKNPIDFLEAKGYKEVKKDLIIKLPKYSLF
ELENGRKRMLASAGELQKGNELALPSKYVNFLYLASHYEK
LKGSPEDNEQKQLFVEQHKHYLDEIIEQISEFSKRVILAD
ANLDKVLSAYNKHRDKPIREQAENIIHLFTLTNLGAPAAF
KYFDTTIDRKRYTSTKEVLDATLIHQSITGLYETRIDLSQ
LGGDEGADKRTADGSEFESPKKKRKV
ABE8.17-d
(SEQ ID NO: 414)
MSEVEFSHEYWMRHALTLAKRAWDEREVPVGAVLVHNNRV
IGEGWNRPIGRHDPTAHAEIMALRQGGLVMQNYRLIDATL
YVTLEPCVMCAGAMIHSRIGRVVFGARDAKTGAAGSLMDV
LHHPGMNHRVEITEGILADECAALLSDFFRMRRQEIKAQK
KAQSSTDSGGSSGGSSGSETPGTSESATPESSGGSSGGSS
EVEFSHEYWMRHALTLAKRARDEREVPVGAVLVLNNRVIG
EGWNRAIGLHDPTAHAEIMALRQGGLVMQNYRLIDATLYS
TFEPCVMCAGAMIHSRIGRVVFGVRNAKTGAAGSLMDVLH
YPGMNHRVEITEGILADECAALLCYFFRMPRRVFNAQKKA
QSSTDSGGSSGGSSGSETPGTSESATPESSGGSSGGSDKK
YSIGLAIGTNSVGWAVITDEYKVPSKKFKVLGNTDRHSIK
KNLIGALLFDSGETAEATRLKRTARRRYTRRKNRICYLQE
IFSNEMAKVDDSFFHRLEESFLVEEDKKHERHPIFGNIVD
EVAYHEKYPTIYHLRKKLVDSTDKADLRLIYLALAHMIKF
RGHFLIEGDLNPDNSDVDKLFIQLVQTYNQLFEENPINAS
GVDAKAILSARLSKSRRLENLIAQLPGEKKNGLFGNLIAL
SLGLTPNFKSNFDLAEDAKLQLSKDTYDDDLDNLLAQIGD
QYADLFLAAKNLSDAILLSDILRVNTEITKAPLSASMIKR
YDEHHQDLTLLKALVRQQLPEKYKEIFFDQSKNGYAGYID
GGASQEEFYKFIKPILEKMDGTEELLVKLNREDLLRKQRT
FDNGSIPHQIHLGELHAILRRQEDFYPFLKDNREKIEKIL
TFRIPYYVGPLARGNSRFAWMTRKSEETITPWNFEEVVDK
GASAQSFIERMTNFDKNLPNEKVLPKHSLLYEYFTVYNEL
TKVKYVTEGMRKPAFLSGEQKKAIVDLLFKTNRKVTVKQL
KEDYFKKIECFDSVEISGVEDRFNASLGTYHDLLKIIKDK
DFLDNEENEDILEDIVLTLTLFEDREMIEERLKTYAHLFD
DKVMKQLKRRRYTGWGRLSRKLINGIRDKQSGKTILDFLK
SDGFANRNFMQLIHDDSLTFKEDIQKAQVSGQGDSLHEHI
ANLAGSPAIKKGILQTVKVVDELVKVMGRHKPENIVIEMA
RENQTTQKGQKNSRERMKRIEEGIKELGSQILKEHPVENT
QLQNEKLYLYYLQNGRDMYVDQELDINRLSDYDVDHIVPQ
SFLKDDSIDNKVLTRSDKNRGKSDNVPSEEVVKKMKNYWR
QLLNAKLITQRKFDNLTKAERGGLSELDKAGFIKRQLVET
RQITKHVAQILDSRMNTKYDENDKLIREVKVITLKSKLVS
DFRKDFQFYKVREINNYHHAHDAYLNAVVGTALIKKYPKL
ESEFVYGDYKVYDVRKMIAKSEQEIGKATAKYFFYSNIMN
FFKTEITLANGEIRKRPLIETNGETGEIVWDKGRDFATVR
KVLSMPQVNIVKKTEVQTGGFSKESILPKRNSDKLIARKK
DWDPKKYGGFDSPTVAYSVLVVAKVEKGKSKKLKSVKELL
GITIMERSSFEKNPIDFLEAKGYKEVKKDLIIKLPKYSLF
ELENGRKRMLASAGELQKGNELALPSKYVNFLYLASHYEK
LKGSPEDNEQKQLFVEQHKHYLDEIIEQISEFSKRVILAD
ANLDKVLSAYNKHRDKPIREQAENIIHLFTLTNLGAPAAF
KYFDTTIDRKRYTSTKEVLDATLIHQSITGLYETRIDLSQ
LGGDEGADKRTADGSEFESPKKKRKV
ABE8.20-d
(SEQ ID NO: 415)
MSEVEFSHEYWMRHALTLAKRAWDEREVPVGAVLVHNNRV
IGEGWNRPIGRHDPTAHAEIMALRQGGLVMQNYRLIDATL
YVTLEPCVMCAGAMIHSRIGRVVFGARDAKTGAAGSLMDV
LHHPGMNHRVEITEGILADECAALLSDFFRMRRQEIKAQK
KAQSSTDSGGSSGGSSGSETPGTSESATPESSGGSSGGSS
EVEFSHEYWMRHALTLAKRARDEREVPVGAVLVLNNRVIG
EGWNRAIGLHDPTAHAEIMALRQGGLVMQNYRLYDATLYS
TFEPCVMCAGAMIHSRIGRVVFGVRNAKTGAAGSLMDVLH
HPGMNHRVEITEGILADECAALLCRFFRMPRRVFNAQKKA
QSSTDSGGSSGGSSGSETPGTSESATPESSGGSSGGSDKK
YSIGLAIGTNSVGWAVITDEYKVPSKKFKVLGNTDRHSIK
KNLIGALLFDSGETAEATRLKRTARRRYTRRKNRICYLQE
IFSNEMAKVDDSFFHRLEESFLVEEDKKHERHPIFGNIVD
EVAYHEKYPTIYHLRKKLVDSTDKADLRLIYLALAHMIKF
RGHFLIEGDLNPDNSDVDKLFIQLVQTYNQLFEENPINAS
GVDAKAILSARLSKSRRLENLIAQLPGEKKNGLFGNLIAL
SLGLTPNFKSNFDLAEDAKLQLSKDTYDDDLDNLLAQIGD
QYADLFLAAKNLSDAILLSDILRVNTEITKAPLSASMIKR
YDEHHQDLTLLKALVRQQLPEKYKEIFFDQSKNGYAGYID
GGASQEEFYKFIKPILEKMDGTEELLVKLNREDLLRKQRT
FDNGSIPHQIHLGELHAILRRQEDFYPFLKDNREKIEKIL
TFRIPYYVGPLARGNSRFAWMTRKSEETITPWNFEEVVDK
GASAQSFIERMTNFDKNLPNEKVLPKHSLLYEYFTVYNEL
TKVKYVTEGMRKPAFLSGEQKKAIVDLLFKTNRKVTVKQL
KEDYFKKIECFDSVEISGVEDRFNASLGTYHDLLKIIKDK
DFLDNEENEDILEDIVLTLTLFEDREMIEERLKTYAHLFD
DKVMKQLKRRRYTGWGRLSRKLINGIRDKQSGKTILDFLK
SDGFANRNFMQLIHDDSLTFKEDIQKAQVSGQGDSLHEHI
ANLAGSPAIKKGILQTVKVVDELVKVMGRHKPENIVIEMA
RENQTTQKGQKNSRERMKRIEEGIKELGSQILKEHPVENT
QLQNEKLYLYYLQNGRDMYVDQELDINRLSDYDVDHIVPQ
SFLKDDSIDNKVLTRSDKNRGKSDNVPSEEVVKKMKNYWR
QLLNAKLITQRKFDNLTKAERGGLSELDKAGFIKRQLVET
RQITKHVAQILDSRMNTKYDENDKLIREVKVITLKSKLVS
DFRKDFQFYKVREINNYHHAHDAYLNAVVGTALIKKYPKL
ESEFVYGDYKVYDVRKMIAKSEQEIGKATAKYFFYSNIMN
FFKTEITLANGEIRKRPLIETNGETGEIVWDKGRDFATVR
KVLSMPQVNIVKKTEVQTGGFSKESILPKRNSDKLIARKK
DWDPKKYGGFDSPTVAYSVLVVAKVEKGKSKKLKSVKELL
GITIMERSSFEKNPIDFLEAKGYKEVKKDLIIKLPKYSLF
ELENGRKRMLASAGELQKGNELALPSKYVNFLYLASHYEK
LKGSPEDNEQKQLFVEQHKHYLDEIIEQISEFSKRVILAD
ANLDKVLSAYNKHRDKPIREQAENIIHLFTLTNLGAPAAF
KYFDTTIDRKRYTSTKEVLDATLIHQSITGLYETRIDLSQ
LGGDEGADKRTADGSEFESPKKKRKV

[0398] In some embodiments, the fusion protein comprises an amino acid sequence that is at least 60%, at least 65%, at least 70%, at least 75%, at least 80%, at least 85%, at least 90%, at least 95%, at least 96%, at least 97%, at least 98%, at least 99%, or at least 99.5% identical to any one of the amino acid sequences set forth in any one of SEQ ID NOs: 153-180, or to any of the fusion proteins provided herein. In some embodiments, the fusion protein comprises an amino acid sequence that has 1, 2, 3, 4, 5, 6, 7, 8, 9, 10, 11, 12, 13, 14, 15, 16, 17, 18, 19, 20, 21, 22, 21, 24, 25, 26, 27, 28, 29, 30, 31, 32, 33, 34, 35, 36, 37, 38, 39, 40, 41, 42, 43, 44, 45, 46, 47, 48, 49, 50, or more mutations compared to any one of the amino acid sequences set forth in SEQ ID NOs: 153-180, or any of the fusion proteins provided herein. In some embodiments, the fusion protein comprises an amino acid sequence that has at least 5, at least 10, at least 15, at least 20, at least 25, at least 30, at least 35, at least 40, at least 45, at least 50, at least 60, at least 70, at least 80, at least 90, at least 100, at least 110, at least 120, at least 130, at least 140, at least 150, at least 160, at least 170, at least 200, at least 300, at least 400, at least 500, at least 600, at least 700, at least 800, at least 900, at least 1000, at least 1100, at least 1200, at least 1300, at least 1400, at least 1500, at least 1600, at least 1700, at least 1750, or at least 1800 identical contiguous amino acid residues as compared to any one of the amino acid sequences set forth in SEQ ID NOs: 153-180, or any of the fusion proteins provided herein. In some embodiments, the fusion protein (base editor) comprises the amino acid sequence of SEQ ID NO: 180, or a variant thereof that is at least 60%, at least 65%, at least 70%, at least 75%, at least 80%, at least 85%, at least 90%, at least 95%, at least 96%, at least 97%, at least 98%, at least 99%, or at least 99.5% identical.

[0399] In some embodiments, the base editor fusion proteins provided herein are capable of modifying a specific nucleotide base without generating a significant proportion of indels. An “indel”, as used herein, refers to the insertion or deletion of a nucleotide base within a nucleic acid. Such insertions or deletions can lead to frame shift mutations within a coding region of a gene. In some embodiments, it is desirable to generate base editors that efficiently modify (e.g. mutate or deaminate) a specific nucleotide within a nucleic acid, without generating a large number of insertions or deletions (i.e., indels) in the nucleic acid. In certain embodiments, any of the base editors provided herein are capable of generating a greater proportion of intended modifications (e.g., point mutations or deaminations) versus indels. In some embodiments, the base editors provided herein are capable of generating a ratio of intended point mutations to indels that is greater than 1:1. In some embodiments, the base editors provided herein are capable of generating a ratio of intended point mutations to indels that is at least 1.5:1, at least 2:1, at least 2.5:1, at least 3:1, at least 3.5:1, at least 4:1, at least 4.5:1, at least 5:1, at least 5.5:1, at least 6:1, at least 6.5:1, at least 7:1, at least 7.5:1, at least 8:1, at least 10:1, at least 12:1, at least 15:1, at least 20:1, at least 25:1, at least 30:1, at least 40:1, at least 50:1, at least 100:1, at least 200:1, at least 300:1, at least 400:1, at least 500:1, at least 600:1, at least 700:1, at least 800:1, at least 900:1, or at least 1000:1, or more. The number of intended mutations and indels may be determined using any suitable method. In some embodiments, to calculate indel frequencies, sequencing reads are scanned for exact matches to two 10-bp sequences that flank both sides of a window in which indels might occur. If no exact matches are located, the read is excluded from analysis. If the length of this indel window exactly matches the reference sequence the read is classified as not containing an indel. If the indel window is two or more bases longer or shorter than the reference sequence, then the sequencing read is classified as an insertion or deletion, respectively.

[0400] In some embodiments, the base editors provided herein are capable of limiting formation of indels in a region of a nucleic acid. In some embodiments, the region is at a nucleotide targeted by a base editor or a region within 2, 3, 4, 5, 6, 7, 8, 9, or 10 nucleotides of a nucleotide targeted by a base editor. In some embodiments, any of the base editors provided herein are capable of limiting the formation of indels at a region of a nucleic acid to less than 1%, less than 1.5%, less than 2%, less than 2.5%, less than 3%, less than 3.5%, less than 4%, less than 4.5%, less than 5%, less than 6%, less than 7%, less than 8%, less than 9%, less than 10%, less than 12%, less than 15%, or less than 20%. The number of indels formed at a nucleic acid region may depend on the amount of time a nucleic acid (e.g., a nucleic acid within the genome of a cell) is exposed to a base editor. In some embodiments, an number or proportion of indels is determined after at least 1 hour, at least 2 hours, at least 6 hours, at least 12 hours, at least 24 hours, at least 36 hours, at least 48 hours, at least 3 days, at least 4 days, at least 5 days, at least 7 days, at least 10 days, or at least 14 days of exposing a nucleic acid (e.g., a nucleic acid within the genome of a cell) to a base editor.

[0401] Some aspects of the disclosure are based on the recognition that any of the base editors provided herein are capable of efficiently generating an intended mutation, such as a point mutation, in a nucleic acid (e.g. a nucleic acid within a genome of a subject) without generating a significant number of unintended mutations, such as unintended point mutations. In some embodiments, an intended mutation is a mutation that is generated by a specific base editor bound to a gRNA, specifically designed to generate the intended mutation. In some embodiments, the intended mutation is a mutation associated with a disease or disorder. In some embodiments, the intended mutation is an adenine (A) to guanine (G) point mutation associated with a disease or disorder. In some embodiments, the intended mutation is a thymine (T) to cytosine (C) point mutation associated with a disease or disorder. In some embodiments, the intended mutation is an adenine (A) to guanine (G) point mutation within the coding region of a gene. In some embodiments, the intended mutation is a thymine (T) to cytosine (C) point mutation within the coding region of a gene. In some embodiments, the intended mutation is a point mutation that generates a stop codon, for example, a premature stop codon within the coding region of a gene. In some embodiments, the intended mutation is a mutation that eliminates a stop codon. In some embodiments, the intended mutation is a mutation that alters the splicing of a gene. In some embodiments, the intended mutation is a mutation that alters the regulatory sequence of a gene (e.g., a gene promotor or gene repressor). In some embodiments, any of the base editors provided herein are capable of generating a ratio of intended mutations to unintended mutations (e.g., intended point mutations:unintended point mutations) that is greater than 1:1. In some embodiments, any of the base editors provided herein are capable of generating a ratio of intended mutations to unintended mutations (e.g., intended point mutations:unintended point mutations) that is at least 1.5:1, at least 2:1, at least 2.5:1, at least 3:1, at least 3.5:1, at least 4:1, at least 4.5:1, at least 5:1, at least 5.5:1, at least 6:1, at least 6.5:1, at least 7:1, at least 7.5:1, at least 8:1, at least 10:1, at least 12:1, at least 15:1, at least 20:1, at least 25:1, at least 30:1, at least 40:1, at least 50:1, at least 100:1, at least 150:1, at least 200:1, at least 250:1, at least 500:1, or at least 1000:1, or more. It should be appreciated that the characteristics of the base editors described in the “Base Editor Efficiency” section, herein, may be applied to any of the fusion proteins, or methods of using the fusion proteins provided herein.

[0402] (2) Exemplary CBEs

[0403] In various embodiments, the present disclosure provides novel cytidine base editors (CBEs) comprising a napDNAbp domain and a cytidine deaminase domain that enzymatically deaminates a cytosine nucleobase of a C:G nucleobase pair to a uracil. The uracil may be subsequently converted to a thymine (T) by the cell's DNA repair and replication machinery. The mismatched guanine (G) on the opposite strand may subsequently be converted to an adenine (A) by the cell's DNA repair and replication machinery. In this manner, a target C:G nucleobase pair is ultimately converted to a T:A nucleobase pair.

[0404] The disclosed novel cytidine base editors exhibit increased on-target editing scope while maintaining minimized off-target DNA editing relative to existing CBEs. The CBEs described herein provide ˜10- to ˜100-fold lower average Cas9-independent off-target DNA editing, while maintaining efficient on-target editing at most positions targetable by existing CBEs. The disclosed CBEs comprise combinations of mutant cytidine deaminases, such as the YE1, YE2, YEE, and R33A deaminases, and Cas9 domains, and/or novel combinations of mutant cytidine deaminases, Cas9 domains, uracil glycosylase inhibitor (UGI) domains and nuclear localizations sequence (NLS) domains, relative to existing base editors. Existing base editors include BE3, which comprises the structure NH₂-[NLS]-[rAPOBEC1 deaminase]-[Cas9 nickase (D10A)]-[UGI domain]-[NLS]-COOH; BE4, which comprises the structure NH₂-[NLS]-[rAPOBEC1 deaminase]-[Cas9 nickase (D10A)]-[UGI domain]-[UGI domain]-[NLS]-COOH; and BE4max, which is a version of BE4 for which the codons of the base editor-encoding construct has been codon-optimized for expression in human cells.

[0405] Zuo et al. recently reported that, when overexpressed in mouse embryos and rice, BE3, the original CBE, induces an average random C:G-to-T:A mutation frequency of 5×10⁻⁸ per bp and 1.7×10⁷ per bp, respectively. See “Cytosine base editor generates substantial off-target single-nucleotide variants in mouse embryos.” Science 364, 289-292 (2019), herein incorporated by reference. Editing was observed in sequences that had little to no similarity to the target sequences. These off-target edits may have arisen from the intrinsic DNA affinity of BE3's deaminase domain, independent of the guide RNA-programmed DNA binding of Cas9. See also Jin et al., Cytosine, but not adenine, base editors induce genome-wide off-target mutations in rice. Science 364, (2019), herein incorporated by reference.

[0406] Zuo et al. also found that Cas9-independent off-target editing events were enriched in transcribed regions of the genome, particularly in highly-expressed genes. Some of these were tumor suppressor genes. Accordingly, there is a need in the art to develop base editors that possess low off-target editing frequencies that may avoid undesired activation or inactivation of genes associated with diseases or disorders, such as cancer, and assays that rapidly measure the off-target editing frequencies of these base editors.

[0407] Exemplary CBEs may provide an off-target editing frequency of less than 2.0% after being contacted with a nucleic acid molecule comprising a target sequence, e.g., a target nucleobase pair. Further exemplary CBEs provide an off-target editing frequency of less than 1.5% after being contacted with a nucleic acid molecule comprising a target sequence comprising a target nucleobase pair. Further exemplary CBEs may provide an off-target editing frequency of less than 1.25%, less than 1.1%, less than 1%, less than 0.75%, less than 0.5%, less than 0.4%, less than 0.25%, less than 0.2%, less than 0.15%, less than 0.1%, less than 0.05%, or less than 0.025%, after being contacted with a nucleic acid molecule comprising a target sequence.

[0408] For instance, the cytidine base editors YE1-BE4, YE1-CP1028, YE1-SpCas9-NG (also referred to herein as YE1-NG), R33A-BE4, and R33A+K34A-BE4-CP1028, which are described below, may exhibit off-target editing frequencies of less than 0.75% (e.g., about 0.4% or less) while maintaining on-target editing efficiencies of about 60% or more, in target sequences in mammalian cells. Each of these base editors comprises modified cytidine deaminases (e.g., YE1, R33A, or R33A+K34A) and may further comprise a modified napDNAbp domain such as a circularly permuted Cas9 domain (e.g., CP1028) or a Cas9 domain with an expanded PAM window (e.g., SpCas9-NG). These five base editors may be the most preferred for applications in which off-target editing, and in particular Cas9-independent off-target editing, must be minimized. In particular, base editors comprising a YE1 deaminase domain provide efficient on-target editing with greatly decreased Cas9-independent editing, as confirmed by whole-genome sequencing.

[0409] Exemplary CBEs may further possess an on-target editing efficiency of more than 50% after being contacted with a nucleic acid molecule comprising a target sequence. Further exemplary CBEs possess an on-target editing efficiency of more than 60% after being contacted with a nucleic acid molecule comprising a target sequence. Further exemplary CBEs possess an on-target editing efficiency of more than 65%, more than 70%, more than 75%, more than 80%, more than 82.5%, or more than 85% after being contacted with a nucleic acid molecule comprising a target sequence.

[0410] The disclosed CBEs may exhibit indel frequencies of less than 0.75%, less than 0.6%, less than 0.5%, less than 0.4%, less than 0.3%, or less than 0.2% after being contacted with a nucleic acid molecule containing a target sequence. The disclosed CBEs may further exhibit reduced RNA off-target editing relative to existing CBEs. The disclosed CBEs may further result in increased product purity after being contacted with a nucleic acid molecule containing a target sequence relative to existing CBEs.

[0411] The disclosed CBEs may further comprise one or more nuclear localization signals (NLSs) and/or two or more uracil glycosylase inhibitor (UGI) domains. Thus, the base editors may comprise the structure: NH₂-[first nuclear localization sequence]-[cytidine deaminase domain]-[napDNAbp domain]-[first UGI domain]-[second UGI domain]-[second nuclear localization sequence]-COOH, wherein each instance of “]-[” indicates the presence of an optional linker sequence. Exemplary CBEs may have a structure that comprises the “BE4max” architecture, with an NH₂-[NLS]-[cytidine deaminase]-[Cas9 nickase]-[UGI domain]-[UGI domain]-[NLS]-COOH structure, having optimized nuclear localization signals and wherein the napDNAbp domain comprises a Cas9 nickase. This BE4max structure was reported to have optimized codon usage for expression in human cells, as reported in Koblan et al., Nat Biotechnol. 2018; 36(9):843-846, herein incorporated by reference.

[0412] In other embodiments, exemplary CBEs may have a structure that comprises a modified BE4max architecture that contains a napDNAbp domain comprising a Cas9 variant other than Cas9 nickase, such as SpCas9-NG, xCas9, or circular permutant CP1028. Accordingly, exemplary CBEs may comprise the structure: NH₂-[NLS]-[cytidine deaminase]-[CP1028]-[UGI domain]-[UGI domain]-[NLS]-COOH; NH₂-[NLS]-[cytidine deaminase]-[xCas9]-[UGI domain]-[UGI domain]-[NLS]-COOH; or NH₂-[NLS]-[cytidine deaminase]-[SpCas9-NG]-[UGI domain]-[UGI domain][NLS]-COOH, wherein each instance of “]-[” indicates the presence of an optional linker sequence.

[0413] The disclosed CBEs may comprise modified (or evolved) cytidine deaminase domains, such as deaminase domains that recognize an expanded PAM sequence, have improved efficiency of deaminating 5′-GC targets, and/or make edits in a narrower target window, In some embodiments, the disclosed cytidine base editors comprise evolved nucleic acid programmable DNA binding proteins (napDNAbp), such as an evolved Cas9.

[0414] Exemplary cytidine base editors comprise sequences that are at least 85%, at least 90%, at least 95%, at least 98%, at least 99%, or at least 99.5% identical to the following amino acid sequences, SEQ ID NOs: 350-375.

[0415] Where indicated, “—BE4” refers to the BE4max architecture, or NH₂-[first nuclear localization sequence]-[cytidine deaminase domain]-[32aa linker]-[SpCas9 nickase (nCas9, or nSpCas9) domain]-[9aa linker]-[first UGI domain]-[9aa-linker]-[second UGI domain]-[second nuclear localization sequence]-COOH. Where indicated, “BE4max, modified with SpCas9-NG” and “—SpCas9-NG” refer to a modified BE4max architecture in which the SpCas9 nickase domain has been replaced with an SpCas9-NG, i.e., NH₂-[first nuclear localization sequence]-[cytidine deaminase domain]-[32aa linker]-[SpCas9-NG]-[9aa linker]-[first UGI domain]-[9aa-linker]-[second UGI domain]-[second nuclear localization sequence]-COOH. And where indicated, “BE4-CP1028” refers to a modified BE4max architecture in which the Cas9 nickase domain has been replaced with a S. pyogenes CP1028, i.e., NH₂-[first nuclear localization sequence]-[cytidine deaminase domain]-[32aa linker]-[CP1028]-[9aa linker]-[first UGI domain]-[9aa-linker]-[second UGI domain]-[second nuclear localization sequence]-COOH.

[0416] As discussed above, preferred base editors comprise modified cytidine deaminases (e.g., YE1, R33A, or R33A+K34A) and may further comprise a modified napDNAbp domain such as a circularly permuted Cas9 domain (e.g., CP1028) or a Cas9 domain with an expanded PAM window (e.g., SpCas9-NG). The napDNAbp domains in the following amino acid sequences are indicated in italics.

BE4max
(SEQ ID NO: 350)
MKRTADGSEFESPKKKRKVSSETGPVAVDPTLRRRIEPHEFEVFF
DPRELRKETCLLYEINWGGRHSIWRHTSQNTNKHVEVNFIEKFTT
ERYFCPNTRCSITWFLSWSPCGECSRAITEFLSRYPHVTLFIYIA
RLYHHADPRNRQGLRDLISSGVTIQIMTEQESGYCWRNFVNYSPS
NEAHWPRYPHLWVRLYVLELYCIILGLPPCLNILRRKQPQLTFFT
IALQSCHYQRLPPHILWATGLKSGGSSGGSSGSETPGTSESATPE
SSGGSSGGSDKKYSIGLAIGTNSVGWAVITDEYKVPSKKFKVLGN
TDRHSIKKNLIGALLFDSGETAEATRLKRTARRRYTRRKNRICYL
QEIFSNEMAKVDDSFFHRLEESFLVEEDKKHERHPIFGNIVDEVA
YHEKYPTIYHLRKKLVDSTDKADLRLIYLALAHMIKFRGHFLIEG
DLNPDNSDVDKLFIQLVQTYNQLFEENPINASGVDAKAILSARLS
KSRRLENLIAQLPGEKKNGLFGNLIALSLGLTPNFKSNFDLAEDA
KLQLSKDTYDDDLDNLLAQIGDQYADLFLAAKNLSDAILLSDILR
VNTEITKAPLSASMIKRYDEHHQDLTLLKALVRQQLPEKYKEIFF
DQSKNGYAGYIDGGASQEEFYKFIKPILEKMDGTEELLVKLNRED
LLRKQRTFDNGSIPHQIHLGELHAILRRQEDFYPFLKDNREKIEK
ILTFRIPYYVGPLARGNSRFAWMTRKSEETITPWNFEEVVDKGAS
AQSFIERMTNFDKNLPNEKVLPKHSLLYEYFTVYNELTKVKYVTE
GMRKPAFLSGEQKKAIVDLLFKTNRKVTVKQLKEDYFKKIECFDS
VEISGVEDRFNASLGTYHDLLKIIKDKDFLDNEENEDILEDIVLT
LTLFEDREMIEERLKTYAHLFDDKVMKQLKRRRYTGWGRLSRKLI
NGIRDKQSGKTILDFLKSDGFANRNFMQLIHDDSLTFKEDIQKAQ
VSGQGDSLHEHIANLAGSPAIKKGILQTVKVVDELVKVMGRHKPE
NIVIEMARENQTTQKGQKNSRERMKRIEEGIKELGSQILKEHPVE
NTQLQNEKLYLYYLQNGRDMYVDQELDINRLSDYDVDHIVPQSFL
KDDSIDNKVLTRSDKNRGKSDNVPSEEVVKKMKNYWRQLLNAKLI
TQRKFDNLTKAERGGLSELDKAGFIKRQLVETRQITKHVAQILDS
RMNTKYDENDKLIREVKVITLKSKLVSDFRKDFQFYKVREINNYH
HAHDAYLNAVVGTALIKKYPKLESEFVYGDYKVYDVRKMIAKSEQ
EIGKATAKYFFYSNIMNFFKTEITLANGEIRKRPLIETNGETGEI
VWDKGRDFATVRKVLSMPQVNIVKKTEVQTGGFSKESIRPKRNSD
KLIARKKDWDPKKYGGFVSPTVAYSVLVVAKVEKGKSKKLKSVKE
LLGITIMERSSFEKNPIDFLEAKGYKEVKKDEIIKLPKYSLFELE
NGRKRMLASARFLQKGNELALPSKYVNFLYLASHYEKLKGSPEDN
EQKQLFVEQHKHYLDEIIEQISEFSKRVILADANLDKVLSAYNKH
RDKPIREQAENIIHLFTLTNLGAPRAFKYFDTTIDRKVYRTSTKE
VLDATLIHQSITGLYETRIDLSQLGGDSGGSGGSGGSTNLSDIIE
KETGKQLVIQESILMLPEEVEEVIGNKPESDILVHTAYDESTDEN
VMLLTSDAPEYKPWALVIQDSNGENKIKMLSGGSGGSGGSTNLSD
IIEKETGKQLVIQESILMLPEEVEEVIGNKPESDILVHTAYDEST
DENVMLLTSDAPEYKPWALVIQDSNGENKIKMLSGGSKRTADGSE
FEPKKKRKV
YE1-BE4
(SEQ ID NO: 351)
MKRTADGSEFESPKKKRKVSSETGPVAVDPTLRRRIEPHEFEVFF
DPRELRKETCLLYEINWGGRHSIWRHTSQNTNKHVEVNFIEKFTT
ERYFCPNTRCSITWFLSYSPCGECSRAITEFLSRYPHVTLFIYIA
RLYHHADPENRQGLRDLISSGVTIQIMTEQESGYCWRNFVNYSPS
NEAHWPRYPHLWVRLYVLELYCIILGLPPCLNILRRKQPQLTFFT
IALQSCHYQRLPPHILWATGLKSGGSSGGSSGSETPGTSESATPE
SSGGSSGGSDKKYSIGLAIGTNSVGWAVITDEYKVPSKKFKVLGN
TDRHSIKKNLIGALLFDSGETAEATRLKRTARRRYTRRKNRICYL
QEIFSNEMAKVDDSFFHRLEESFLVEEDKKHERHPIFGNIVDEVA
YHEKYPTIYHLRKKLVDSTDKADLRLIYLALAHMIKFRGHFLIEG
DLNPDNSDVDKLFIQLVQTYNQLFEENPINASGVDAKAILSARLS
KSRRLENLIAQLPGEKKNGLFGNLIALSLGLTPNFKSNFDLAEDA
KLQLSKDTYDDDLDNLLAQIGDQYADLFLAAKNLSDAILLSDILR
VNTEITKAPLSASMIKRYDEHHQDLTLLKALVRQQLPEKYKEIFF
DQSKNGYAGYIDGGASQEEFYKFIKPILEKMDGTEELLVKLNRED
LLRKQRTFDNGSIPHQIHLGELHAILRRQEDFYPFLKDNREKIEK
ILTFRIPYYVGPLARGNSRFAWMTRKSEETITPWNFEEVVDKGAS
AQSFIERMTNFDKNLPNEKVLPKHSLLYEYFTVYNELTKVKYVTE
GMRKPAFLSGEQKKAIVDLLFKTNRKVTVKQLKEDYFKKIECFDS
VEISGVEDRFNASLGTYHDLLKIIKDKDFLDNEENEDILEDIVLT
LTLFEDREMIEERLKTYAHLFDDKVMKQLKRRRYTGWGRLSRKLI
NGIRDKQSGKTILDFLKSDGFANRNFMQLIHDDSLTFKEDIQKAQ
VSGQGDSLHEHIANLAGSPAIKKGILQTVKVVDELVKVMGRHKPE
NIVIEMARENQTTQKGQKNSRERMKRIEEGIKELGSQILKEHPVE
NTQLQNEKLYLYYLQNGRDMYVDQELDINRLSDYDVDHIVPQSFL
KDDSIDNKVLTRSDKNRGKSDNVPSEEVVKKMKNYWRQLLNAKLI
TQRKFDNLTKAERGGLSELDKAGFIKRQLVETRQITKHVAQILDS
RMNTKYDENDKLIREVKVITLKSKLVSDFRKDFQFYKVREINNYH
HAHDAYLNAVVGTALIKKYPKLESEFVYGDYKVYDVRKMIAKSEQ
EIGKATAKYFFYSNIMNFFKTEITLANGEIRKRPLIETNGETGEI
VWDKGRDFATVRKVLSMPQVNIVKKTEVQTGGFSKESIRPKRNSD
KLIARKKDWDPKKYGGFVSPTVAYSVLVVAKVEKGKSKKLKSVKE
LLGITIMERSSFEKNPIDFLEAKGYKEVKKDEIIKLPKYSLFELE
NGRKRMLASARFLQKGNELALPSKYVNFLYLASHYEKLKGSPEDN
EQKQLFVEQHKHYLDEIIEQISEFSKRVILADANLDKVLSAYNKH
RDKPIREQAENIIHLFTLTNLGAPRAFKYFDTTIDRKVYRTSTKE
VLDATLIHQSITGLYETRIDLSQLGGDSGGSGGSGGSTNLSDIIE
KETGKQLVIQESILMLPEEVEEVIGNKPESDILVHTAYDESTDEN
VMLLTSDAPEYKPWALVIQDSNGENKIKMLSGGSGGSGGSTNLSD
IIEKETGKQLVIQESILMLPEEVEEVIGNKPESDILVHTAYDEST
DENVMLLTSDAPEYKPWALVIQDSNGENKIKMLSGGSKRTADGSE
FEPKKKRKV
YE2-BE4
(SEQ ID NO: 352)
MKRTADGSEFESPKKKRKVSSETGPVAVDPTLRRRIEPHEFEVFF
DPRELRKETCLLYEINWGGRHSIWRHTSQNTNKHVEVNFIEKFTT
ERYFCPNTRCSITWFLSYSPCGECSRAITEFLSRYPHVTLFIYIA
RLYHHADPRNRQGLEDLISSGVTIQIMTEQESGYCWRNFVNYSPS
NEAHWPRYPHLWVRLYVLELYCIILGLPPCLNILRRKQPQLTFFT
IALQSCHYQRLPPHILWATGLKSGGSSGGSSGSETPGTSESATPE
SSGGSSGGSDKKYSIGLAIGTNSVGWAVITDEYKVPSKKFKVLGN
TDRHSIKKNLIGALLFDSGETAEATRLKRTARRRYTRRKNRICYL
QEIFSNEMAKVDDSFFHRLEESFLVEEDKKHERHPIFGNIVDEVA
YHEKYPTIYHLRKKLVDSTDKADLRLIYLALAHMIKFRGHFLIEG
DLNPDNSDVDKLFIQLVQTYNQLFEENPINASGVDAKAILSARLS
KSRRLENLIAQLPGEKKNGLFGNLIALSLGLTPNFKSNFDLAEDA
KLQLSKDTYDDDLDNLLAQIGDQYADLFLAAKNLSDAILLSDILR
VNTEITKAPLSASMIKRYDEHHQDLTLLKALVRQQLPEKYKEIFF
DQSKNGYAGYIDGGASQEEFYKFIKPILEKMDGTEELLVKLNRED
LLRKQRTFDNGSIPHQIHLGELHAILRRQEDFYPFLKDNREKIEK
ILTFRIPYYVGPLARGNSRFAWMTRKSEETITPWNFEEVVDKGAS
AQSFIERMTNFDKNLPNEKVLPKHSLLYEYFTVYNELTKVKYVTE
GMRKPAFLSGEQKKAIVDLLFKTNRKVTVKQLKEDYFKKIECFDS
VEISGVEDRFNASLGTYHDLLKIIKDKDFLDNEENEDILEDIVLT
LTLFEDREMIEERLKTYAHLFDDKVMKQLKRRRYTGWGRLSRKLI
NGIRDKQSGKTILDFLKSDGFANRNFMQLIHDDSLTFKEDIQKAQ
VSGQGDSLHEHIANLAGSPAIKKGILQTVKVVDELVKVMGRHKPE
NIVIEMARENQTTQKGQKNSRERMKRIEEGIKELGSQILKEHPVE
NTQLQNEKLYLYYLQNGRDMYVDQELDINRLSDYDVDHIVPQSFL
KDDSIDNKVLTRSDKNRGKSDNVPSEEVVKKMKNYWRQLLNAKLI
TQRKFDNLTKAERGGLSELDKAGFIKRQLVETRQITKHVAQILDS
RMNTKYDENDKLIREVKVITLKSKLVSDFRKDFQFYKVREINNYH
HAHDAYLNAVVGTALIKKYPKLESEFVYGDYKVYDVRKMIAKSEQ
EIGKATAKYFFYSNIMNFFKTEITLANGEIRKRPLIETNGETGEI
VWDKGRDFATVRKVLSMPQVNIVKKTEVQTGGFSKESIRPKRNSD
KLIARKKDWDPKKYGGFVSPTVAYSVLVVAKVEKGKSKKLKSVKE
LLGITIMERSSFEKNPIDFLEAKGYKEVKKDEIIKLPKYSLFELE
NGRKRMLASARFLQKGNELALPSKYVNFLYLASHYEKLKGSPEDN
EQKQLFVEQHKHYLDEIIEQISEFSKRVILADANLDKVLSAYNKH
RDKPIREQAENIIHLFTLTNLGAPRAFKYFDTTIDRKVYRTSTKE
VLDATLIHQSITGLYETRIDLSQLGGDSGGSGGSGGSTNLSDIIE
KETGKQLVIQESILMLPEEVEEVIGNKPESDILVHTAYDESTDEN
VMLLTSDAPEYKPWALVIQDSNGENKIKMLSGGSGGSGGSTNLSD
IIEKETGKQLVIQESILMLPEEVEEVIGNKPESDILVHTAYDEST
DENVMLLTSDAPEYKPWALVIQDSNGENKIKMLSGGSKRTADGSE
FEPKKKRKV
YEE-BE4
(SEQ ID NO: 353)
MKRTADGSEFESPKKKRKVSSETGPVAVDPTLRRRIEPHEFEVFF
DPRELRKETCLLYEINWGGRHSIWRHTSQNTNKHVEVNFIEKFTT
ERYFCPNTRCSITWFLSYSPCGECSRAITEFLSRYPHVTLFIYIA
RLYHHADPENRQGLEDLISSGVTIQIMTEQESGYCWRNFVNYSPS
NEAHWPRYPHLWVRLYVLELYCIILGLPPCLNILRRKQPQLTFFT
IALQSCHYQRLPPHILWATGLKSGGSSGGSSGSETPGTSESATPE
SSGGSSGGSDKKYSIGLAIGTNSVGWAVITDEYKVPSKKFKVLGN
TDRHSIKKNLIGALLFDSGETAEATRLKRTARRRYTRRKNRICYL
QEIFSNEMAKVDDSFFHRLEESFLVEEDKKHERHPIFGNIVDEVA
YHEKYPTIYHLRKKLVDSTDKADLRLIYLALAHMIKFRGHFLIEG
DLNPDNSDVDKLFIQLVQTYNQLFEENPINASGVDAKAILSARLS
KSRRLENLIAQLPGEKKNGLFGNLIALSLGLTPNFKSNFDLAEDA
KLQLSKDTYDDDLDNLLAQIGDQYADLFLAAKNLSDAILLSDILR
VNTEITKAPLSASMIKRYDEHHQDLTLLKALVRQQLPEKYKEIFF
DQSKNGYAGYIDGGASQEEFYKFIKPILEKMDGTEELLVKLNRED
LLRKQRTFDNGSIPHQIHLGELHAILRRQEDFYPFLKDNREKIEK
ILTFRIPYYVGPLARGNSRFAWMTRKSEETITPWNFEEVVDKGAS
AQSFIERMTNFDKNLPNEKVLPKHSLLYEYFTVYNELTKVKYVTE
GMRKPAFLSGEQKKAIVDLLFKTNRKVTVKQLKEDYFKKIECFDS
VEISGVEDRFNASLGTYHDLLKIIKDKDFLDNEENEDILEDIVLT
LTLFEDREMIEERLKTYAHLFDDKVMKQLKRRRYTGWGRLSRKLI
NGIRDKQSGKTILDFLKSDGFANRNFMQLIHDDSLTFKEDIQKAQ
VSGQGDSLHEHIANLAGSPAIKKGILQTVKVVDELVKVMGRHKPE
NIVIEMARENQTTQKGQKNSRERMKRIEEGIKELGSQILKEHPVE
NTQLQNEKLYLYYLQNGRDMYVDQELDINRLSDYDVDHIVPQSFL
KDDSIDNKVLTRSDKNRGKSDNVPSEEVVKKMKNYWRQLLNAKLI
TQRKFDNLTKAERGGLSELDKAGFIKRQLVETRQITKHVAQILDS
RMNTKYDENDKLIREVKVITLKSKLVSDFRKDFQFYKVREINNYH
HAHDAYLNAVVGTALIKKYPKLESEFVYGDYKVYDVRKMIAKSEQ
EIGKATAKYFFYSNIMNFFKTEITLANGEIRKRPLIETNGETGEI
VWDKGRDFATVRKVLSMPQVNIVKKTEVQTGGFSKESIRPKRNSD
KLIARKKDWDPKKYGGFVSPTVAYSVLVVAKVEKGKSKKLKSVKE
LLGITIMERSSFEKNPIDFLEAKGYKEVKKDEIIKLPKYSLFELE
NGRKRMLASARFLQKGNELALPSKYVNFLYLASHYEKLKGSPEDN
EQKQLFVEQHKHYLDEIIEQISEFSKRVILADANLDKVLSAYNKH
RDKPIREQAENIIHLFTLTNLGAPRAFKYFDTTIDRKVYRTSTKE
VLDATLIHQSITGLYETRIDLSQLGGDSGGSGGSGGSTNLSDIIE
KETGKQLVIQESILMLPEEVEEVIGNKPESDILVHTAYDESTDEN
VMLLTSDAPEYKPWALVIQDSNGENKIKMLSGGSGGSGGSTNLSD
IIEKETGKQLVIQESILMLPEEVEEVIGNKPESDILVHTAYDEST
DENVMLLTSDAPEYKPWALVIQDSNGENKIKMLSGGSKRTADGSE
FEPKKKRKV
EE-BE4
(SEQ ID NO: 354)
MKRTADGSEFESPKKKRKVSSETGPVAVDPTLRRRIEPHEFEVFF
DPRELRKETCLLYEINWGGRHSIWRHTSQNTNKHVEVNFIEKFTT
ERYFCPNTRCSITWFLSWSPCGECSRAITEFLSRYPHVTLFIYIA
RLYHHADPENRQGLEDLISSGVTIQIMTEQESGYCWRNFVNYSPS
NEAHWPRYPHLWVRLYVLELYCIILGLPPCLNILRRKQPQLTFFT
IALQSCHYQRLPPHILWATGLKSGGSSGGSSGSETPGTSESATPE
SSGGSSGGSDKKYSIGLAIGTNSVGWAVITDEYKVPSKKFKVLGN
TDRHSIKKNLIGALLFDSGETAEATRLKRTARRRYTRRKNRICYL
QEIFSNEMAKVDDSFFHRLEESFLVEEDKKHERHPIFGNIVDEVA
YHEKYPTIYHLRKKLVDSTDKADLRLIYLALAHMIKFRGHFLIEG
DLNPDNSDVDKLFIQLVQTYNQLFEENPINASGVDAKAILSARLS
KSRRLENLIAQLPGEKKNGLFGNLIALSLGLTPNFKSNFDLAEDA
KLQLSKDTYDDDLDNLLAQIGDQYADLFLAAKNLSDAILLSDILR
VNTEITKAPLSASMIKRYDEHHQDLTLLKALVRQQLPEKYKEIFF
DQSKNGYAGYIDGGASQEEFYKFIKPILEKMDGTEELLVKLNRED
LLRKQRTFDNGSIPHQIHLGELHAILRRQEDFYPFLKDNREKIEK
ILTFRIPYYVGPLARGNSRFAWMTRKSEETITPWNFEEVVDKGAS
AQSFIERMTNFDKNLPNEKVLPKHSLLYEYFTVYNELTKVKYVTE
GMRKPAFLSGEQKKAIVDLLFKTNRKVTVKQLKEDYFKKIECFDS
VEISGVEDRFNASLGTYHDLLKIIKDKDFLDNEENEDILEDIVLT
LTLFEDREMIEERLKTYAHLFDDKVMKQLKRRRYTGWGRLSRKLI
NGIRDKQSGKTILDFLKSDGFANRNFMQLIHDDSLTFKEDIQKAQ
VSGQGDSLHEHIANLAGSPAIKKGILQTVKVVDELVKVMGRHKPE
NIVIEMARENQTTQKGQKNSRERMKRIEEGIKELGSQILKEHPVE
NTQLQNEKLYLYYLQNGRDMYVDQELDINRLSDYDVDHIVPQSFL
KDDSIDNKVLTRSDKNRGKSDNVPSEEVVKKMKNYWRQLLNAKLI
TQRKFDNLTKAERGGLSELDKAGFIKRQLVETRQITKHVAQILDS
RMNTKYDENDKLIREVKVITLKSKLVSDFRKDFQFYKVREINNYH
HAHDAYLNAVVGTALIKKYPKLESEFVYGDYKVYDVRKMIAKSEQ
EIGKATAKYFFYSNIMNFFKTEITLANGEIRKRPLIETNGETGEI
VWDKGRDFATVRKVLSMPQVNIVKKTEVQTGGFSKESIRPKRNSD
KLIARKKDWDPKKYGGFVSPTVAYSVLVVAKVEKGKSKKLKSVKE
LLGITIMERSSFEKNPIDFLEAKGYKEVKKDEIIKLPKYSLFELE
NGRKRMLASARFLQKGNELALPSKYVNFLYLASHYEKLKGSPEDN
EQKQLFVEQHKHYLDEIIEQISEFSKRVILADANLDKVLSAYNKH
RDKPIREQAENIIHLFTLTNLGAPRAFKYFDTTIDRKVYRTSTKE
VLDATLIHQSITGLYETRIDLSQLGGDSGGSGGSGGSTNLSDIIE
KETGKQLVIQESILMLPEEVEEVIGNKPESDILVHTAYDESTDEN
VMLLTSDAPEYKPWALVIQDSNGENKIKMLSGGSGGSGGSTNLSD
IIEKETGKQLVIQESILMLPEEVEEVIGNKPESDILVHTAYDEST
DENVMLLTSDAPEYKPWALVIQDSNGENKIKMLSGGSKRTADGSE
FEPKKKRKV
R33A-BE4
(SEQ ID NO: 355)
MKRTADGSEFESPKKKRKVSSETGPVAVDPTLRRRIEPHEFEVFF
DPRELAKETCLLYEINWGGRHSIWRHTSQNTNKHVEVNFIEKFTT
ERYFCPNTRCSITWFLSWSPCGECSRAITEFLSRYPHVTLFIYIA
RLYHHADPRNRQGLRDLISSGVTIQIMTEQESGYCWRNFVNYSPS
NEAHWPRYPHLWVRLYVLELYCIILGLPPCLNILRRKQPQLTFFT
IALQSCHYQRLPPHILWATGLKSGGSSGGSSGSETPGTSESATPE
SSGGSSGGSDKKYSIGLAIGTNSVGWAVITDEYKVPSKKFKVLGN
TDRHSIKKNLIGALLFDSGETAEATRLKRTARRRYTRRKNRICYL
QEIFSNEMAKVDDSFFHRLEESFLVEEDKKHERHPIFGNIVDEVA
YHEKYPTIYHLRKKLVDSTDKADLRLIYLALAHMIKFRGHFLIEG
DLNPDNSDVDKLFIQLVQTYNQLFEENPINASGVDAKAILSARLS
KSRRLENLIAQLPGEKKNGLFGNLIALSLGLTPNFKSNFDLAEDA
KLQLSKDTYDDDLDNLLAQIGDQYADLFLAAKNLSDAILLSDILR
VNTEITKAPLSASMIKRYDEHHQDLTLLKALVRQQLPEKYKEIFF
DQSKNGYAGYIDGGASQEEFYKFIKPILEKMDGTEELLVKLNRED
LLRKQRTFDNGSIPHQIHLGELHAILRRQEDFYPFLKDNREKIEK
ILTFRIPYYVGPLARGNSRFAWMTRKSEETITPWNFEEVVDKGAS
AQSFIERMTNFDKNLPNEKVLPKHSLLYEYFTVYNELTKVKYVTE
GMRKPAFLSGEQKKAIVDLLFKTNRKVTVKQLKEDYFKKIECFDS
VEISGVEDRFNASLGTYHDLLKIIKDKDFLDNEENEDILEDIVLT
LTLFEDREMIEERLKTYAHLFDDKVMKQLKRRRYTGWGRLSRKLI
NGIRDKQSGKTILDFLKSDGFANRNFMQLIHDDSLTFKEDIQKAQ
VSGQGDSLHEHIANLAGSPAIKKGILQTVKVVDELVKVMGRHKPE
NIVIEMARENQTTQKGQKNSRERMKRIEEGIKELGSQILKEHPVE
NTQLQNEKLYLYYLQNGRDMYVDQELDINRLSDYDVDHIVPQSFL
KDDSIDNKVLTRSDKNRGKSDNVPSEEVVKKMKNYWRQLLNAKLI
TQRKFDNLTKAERGGLSELDKAGFIKRQLVETRQITKHVAQILDS
RMNTKYDENDKLIREVKVITLKSKLVSDFRKDFQFYKVREINNYH
HAHDAYLNAVVGTALIKKYPKLESEFVYGDYKVYDVRKMIAKSEQ
EIGKATAKYFFYSNIMNFFKTEITLANGEIRKRPLIETNGETGEI
VWDKGRDFATVRKVLSMPQVNIVKKTEVQTGGFSKESIRPKRNSD
KLIARKKDWDPKKYGGFVSPTVAYSVLVVAKVEKGKSKKLKSVKE
LLGITIMERSSFEKNPIDFLEAKGYKEVKKDEIIKLPKYSLFELE
NGRKRMLASARFLQKGNELALPSKYVNFLYLASHYEKLKGSPEDN
EQKQLFVEQHKHYLDEIIEQISEFSKRVILADANLDKVLSAYNKH
RDKPIREQAENIIHLFTLTNLGAPRAFKYFDTTIDRKVYRTSTKE
VLDATLIHQSITGLYETRIDLSQLGGDSGGSGGSGGSTNLSDIIE
KETGKQLVIQESILMLPEEVEEVIGNKPESDILVHTAYDESTDEN
VMLLTSDAPEYKPWALVIQDSNGENKIKMLSGGSGGSGGSTNLSD
IIEKETGKQLVIQESILMLPEEVEEVIGNKPESDILVHTAYDEST
DENVMLLTSDAPEYKPWALVIQDSNGENKIKMLSGGSKRTADGSE
FEPKKKRKV
R33A + K34A-BE4
(SEQ ID NO: 356)
MKRTADGSEFESPKKKRKVSSETGPVAVDPTLRRRIEPHEFEVFFD
PRELAAETCLLYEINWGGRHSIWRHTSQNTNKHVEVNFIEKFTTER
YFCPNTRCSITWFLSWSPCGECSRAITEFLSRYPHVTLFIYIARLY
HHADPRNRQGLRDLISSGVTIQIMTEQESGYCWRNFVNYSPSNEA
HWPRYPHLWVRLYVLELYCIILGLPPCLNILRRKQPQLTFFTIAL
QSCHYQRLPPHILWATGLKSGGSSGGSSGSETPGTSESATPESSG
GSSGGSDKKYSIGLAIGTNSVGWAVITDEYKVPSKKFKVLGNTDR
HSIKKNLIGALLFDSGETAEATRLKRTARRRYTRRKNRICYLQEI
FSNEMAKVDDSFFHRLEESFLVEEDKKHERHPIFGNIVDEVAYHE
KYPTIYHLRKKLVDSTDKADLRLIYLALAHMIKFRGHFLIEGDLN
PDNSDVDKLFIQLVQTYNQLFEENPINASGVDAKAILSARLSKSR
RLENLIAQLPGEKKNGLFGNLIALSLGLTPNFKSNFDLAEDAKLQ
LSKDTYDDDLDNLLAQIGDQYADLFLAAKNLSDAILLSDILRVNT
EITKAPLSASMIKRYDEHHQDLTLLKALVRQQLPEKYKEIFFDQS
KNGYAGYIDGGASQEEFYKFIKPILEKMDGTEELLVKLNREDLLR
KQRTFDNGSIPHQIHLGELHAILRRQEDFYPFLKDNREKIEKILT
FRIPYYVGPLARGNSRFAWMTRKSEETITPWNFEEVVDKGASAQS
FIERMTNFDKNLPNEKVLPKHSLLYEYFTVYNELTKVKYVTEGMR
KPAFLSGEQKKAIVDLLFKTNRKVTVKQLKEDYFKKIECFDSVEI
SGVEDRFNASLGTYHDLLKIIKDKDFLDNEENEDILEDIVLTLTL
FEDREMIEERLKTYAHLFDDKVMKQLKRRRYTGWGRLSRKLINGI
RDKQSGKTILDFLKSDGFANRNFMQLIHDDSLTFKEDIQKAQVSG
QGDSLHEHIANLAGSPAIKKGILQTVKVVDELVKVMGRHKPENIV
IEMARENQTTQKGQKNSRERMKRIEEGIKELGSQILKEHPVENTQ
LQNEKLYLYYLQNGRDMYVDQELDINRLSDYDVDHIVPQSFLKDD
SIDNKVLTRSDKNRGKSDNVPSEEVVKKMKNYWRQLLNAKLITQR
KFDNLTKAERGGLSELDKAGFIKRQLVETRQITKHVAQILDSRMN
TKYDENDKLIREVKVITLKSKLVSDFRKDFQFYKVREINNYHHAH
DAYLNAVVGTALIKKYPKLESEFVYGDYKVYDVRKMIAKSEQEIG
KATAKYFFYSNIMNFFKTEITLANGEIRKRPLIETNGETGEIVWD
KGRDFATVRKVLSMPQVNIVKKTEVQTGGFSKESIRPKRNSDKLI
ARKKDWDPKKYGGFVSPTVAYSVLVVAKVEKGKSKKLKSVKELLG
ITIMERSSFEKNPIDFLEAKGYKEVKKDEIIKLPKYSLFELENGR
KRMLASARFLQKGNELALPSKYVNFLYLASHYEKLKGSPEDNEQK
QLFVEQHKHYLDEIIEQISEFSKRVILADANLDKVLSAYNKHRDK
PIREQAENIIHLFTLTNLGAPRAFKYFDTTIDRKVYRTSTKEVLD
ATLIHQSITGLYETRIDLSQLGGDSGGSGGSGGSTNLSDIIEKET
GKQLVIQESILMLPEEVEEVIGNKPESDILVHTAYDESTDENVML
LTSDAPEYKPWALVIQDSNGENKIKMLSGGSGGSGGSTNLSDIIE
KETGKQLVIQESILMLPEEVEEVIGNKPESDILVHTAYDESTDEN
VMLLTSDAPEYKPWALVIQDSNGENKIKMLSGGSKRTADGSEFEP
KKKRKV
APOBEC3A (A3A)-BE4
(SEQ ID NO: 357)
MKRTADGSEFESPKKKRKVSEASPASGPRHLMDPHIFTSNFNNGI
GRHKTYLCYEVERLDNGTSVKMDQHRGFLHNQAKNLLCGFYGRHA
ELRFLDLVPSLQLDPAQIYRVTWFISWSPCFSWGCAGEVRAFLQE
NTHVRLRIFAARIYDYDPLYKEALQMLRDAGAQVSIMTYDEFKHC
WDTFVDHQGCPFQPWDGLDEHSQALSGRLRAILQNQGNSGGSSGG
SSGSETPGTSESATPESSGGSSGGSDKKYSIGLAIGTNSVGWAVI
TDEYKVPSKKFKVLGNTDRHSIKKNLIGALLFDSGETAEATRLKR
TARRRYTRRKNRICYLQEIFSNEMAKVDDSFFHRLEESFLVEEDK
KHERHPIFGNIVDEVAYHEKYPTIYHLRKKLVDSTDKADLRLIYL
ALAHMIKFRGHFLIEGDLNPDNSDVDKLFIQLVQTYNQLFEENPI
NASGVDAKAILSARLSKSRRLENLIAQLPGEKKNGLFGNLIALSL
GLTPNFKSNFDLAEDAKLQLSKDTYDDDLDNLLAQIGDQYADLFL
AAKNLSDAILLSDILRVNTEITKAPLSASMIKRYDEHHQDLTLLK
ALVRQQLPEKYKEIFFDQSKNGYAGYIDGGASQEEFYKFIKPILE
KMDGTEELLVKLNREDLLRKQRTFDNGSIPHQIHLGELHAILRRQ
EDFYPFLKDNREKIEKILTFRIPYYVGPLARGNSRFAWMTRKSEE
TITPWNFEEVVDKGASAQSFIERMTNFDKNLPNEKVLPKHSLLYE
YFTVYNELTKVKYVTEGMRKPAFLSGEQKKAIVDLLFKTNRKVTV
KQLKEDYFKKIECFDSVEISGVEDRFNASLGTYHDLLKIIKDKDF
LDNEENEDILEDIVLTLTLFEDREMIEERLKTYAHLFDDKVMKQL
KRRRYTGWGRLSRKLINGIRDKQSGKTILDFLKSDGFANRNFMQL
IHDDSLTFKEDIQKAQVSGQGDSLHEHIANLAGSPAIKKGILQTV
KVVDELVKVMGRHKPENIVIEMARENQTTQKGQKNSRERMKRIEE
GIKELGSQILKEHPVENTQLQNEKLYLYYLQNGRDMYVDQELDIN
RLSDYDVDHIVPQSFLKDDSIDNKVLTRSDKNRGKSDNVPSEEVV
KKMKNYWRQLLNAKLITQRKFDNLTKAERGGLSELDKAGFIKRQL
VETRQITKHVAQILDSRMNTKYDENDKLIREVKVITLKSKLVSDF
RKDFQFYKVREINNYHHAHDAYLNAVVGTALIKKYPKLESEFVYG
DYKVYDVRKMIAKSEQEIGKATAKYFFYSNIMNFFESIRPKRNSD
KLIARKKDWDPKKYGGFVSPTVAYSVLVVAKVEKGKSKKLKSVKE
LLGITIMERSSFEKNPIDFLEAKGYKEVKKDEIIKLPKYSLFELE
NGRKRMLASARFLQKGNELALPSKYVNFLYLASHYEKLKGSPEDN
EQKQLFVEQHKHYLDEIIEQISEFSKRVILADANLDKVLSAYNKH
RDKPIREQAENIIHLFTLTNLGAPRAFKYFDTTIDRKVYRTSTKE
VLDATLIHQSITGLYETRIDLSQLGGDSGGSGGSGGSYNLSDIIE
KETGKQLVIQESILMLPEEVEEVIGNKPESDILVHTAYDESTDEN
VMLLTSDAPEYKPWALVIQDSNGENKIKMLSGGSGGSGGSTNLSD
IIEKETGKQLVIQESILMLPEEVEEVIGNKPESDILVHTAYDEST
DENVMLLTSDAPEYKPWALVIQDSNGENKIKMLSGGSKRTADGSE
FEPKKKRKV
APOBEC3B (A3B)-BE4
(SEQ ID NO: 358)
MKRTADGSEFESPKKKRKVNPQIRNPMERMYRDTFYDNFENEPIL
YGRSYTWLCYEVKIKRGRSNLLWDTGVFRGQVYFKPQYHAEMCFL
SWFCGNQLPAYKCFQITWFVSWTPCPDCVAKLAEFLSEHPNVTLT
ISAARLYYYWERDYRRALCRLSQAGARVTIMDYEEFAYCWENFVY
NEGQQFMPWYKFDENYAFLHRTLKEILRYLMDPDTFTFNFNNDPL
VLRRRQTYLCYEVERLDNGTWVLMDQHMGFLCNEAKNLLCGFYGR
HAELRFLDLVPSLQLDPAQIYRVTWFISWSPCFSWGCAGEVRAFL
QENTHVRLRIFAARIYDYDPLYKEALQMLRDAGAQVSIMTYDEFE
YCWDTFVYRQGCPFQPWDGLEEHSQALSGRLRAILQNQGNSGGSS
GGSSGSETPGTSESATPESSGGSSGGSDKKYSIGLAIGTNSVGWA
VITDEYKVPSKKFKVLGNTDRHSIKKNLIGALLFDSGETAEATRL
KRTARRRYTRRKNRICYLQEIFSNEMAKVDDSFFHRLEESFLVEE
DKKHERHPIFGNIVDEVAYHEKYPTIYHLRKKLVDSTDKADLRLI
YLALAHMIKFRGHFLIEGDLNPDNSDVDKLFIQLVQTYNQLFEEN
PINASGVDAKAILSARLSKSRRLENLIAQLPGEKKNGLFGNLIAL
SLGLTPNFKSNFDLAEDAKLQLSKDTYDDDLDNLLAQIGDQYADL
FLAAKNLSDAILLSDILRVNTEITKAPLSASMIKRYDEHHQDLTL
LKALVRQQLPEKYKEIFFDQSKNGYAGYIDGGASQEEFYKFIKPI
LEKMDGTEELLVKLNREDLLRKQRTFDNGSIPHQIHLGELHAILR
RQEDFYPFLKDNREKIEKILTFRIPYYVGPLARGNSRFAWMTRKS
EETITPWNFEEVVDKGASAQSFIERMTNFDKNLPNEKVLPKHSLL
YEYFTVYNELTKVKYVTEGMRKPAFLSGEQKKAIVDLLFKTNRKV
TVKQLKEDYFKKIECFDSVEISGVEDRFNASLGTYHDLLKIIKDK
DFLDNEENEDILEDIVLTLTLFEDREMIEERLKTYAHLFDDKVMK
QLKRRRYTGWGRLSRKLINGIRDKQSGKTILDFLKSDGFANRNFM
QLIHDDSLTFKEDIQKAQVSGQGDSLHEHIANLAGSPAIKKGILQ
TVKVVDELVKVMGRHKPENIVIEMARENQTTQKGQKNSRERMKRI
EEGIKELGSQILKEHPVENTQLQNEKLYLYYLQNGRDMYVDQELD
INRLSDYDVDHIVPQSFLKDDSIDNKVLTRSDKNRGKSDNVPSEE
VVKKMKNYWRQLLNAKLITQRKFDNLTKAERGGLSELDKAGFIKR
QLVETRQITKHVAQILDSRMNTKYDENDKLIREVKVITLKSKLVS
DFRKDFQFYKVREINNYHHAHDAYLNAVVGTALIKKYPKLESEFV
YGDYKVYDVRKMIAKSEQEIGKATAKYFFYSNIMNFFKTEITLAN
GEIRKRPLIETNGETGEIVWDKGRDFATVRKVLSMPQVNIVKKTE
VQTGGFSKESIRPKRNSDKLIARKKDWDPKKYGGFVSPTVAYSVL
VVAKVEKGKSKKLKSVKELLGITIMERSSFEKNPIDFLEAKGYKE
VKKDEIIKLPKYSLFELENGRKRMLASARFLQKGNELALPSKYVN
FLYLASHYEKLKGSPEDNEQKQLFVEQHKHYLDEIIEQISEFSKR
VILADANLDKVLSAYNKHRDKPIREQAENIIHLFTLTNLGAPRAF
KYFDTTIDRKVYRTSTKEVLDATLIHQSITGLYETRIDLSQLGGD
SGGSGGSGGSTNLSDIIEKETGKQLVIQESILMLPEEVEEVIGNK
PESDILVHTAYDESTDENVMLLTSDAPEYKPWALVIQDSNGENKI
KMLSGGSGGSGGSTNLSDIIEKETGKQLVIQESILMLPEEVEEVI
GNKPESDILVHTAYDESTDENVMLLTSDAPEYKPWALVIQDSNGE
NKIKMLSGGSKRTADGSEFEPKKKRKV
APOBEC3G (A3G)-BE4
(SEQ ID NO: 359)
MKRTADGSEFESPKKKRKVKPHFRNTVERMYRDTFSYNFYNRPIL
SRRNTVWLCYEVKTKGPSRPPLDAKIFRGQVYSELKYHPEMRFFH
WFSKWRKLHRDQEYEVTWYISWSPCTKCTRDMATFLAEDPKVTLT
IFVARLYYFWDPDYQEALRSLCQKRDGPRATMKIMNYDEFQHCWS
KFVYSQRELFEPWNNLPKYYILLHIMLGEILRHSMDPPTFTFNFN
NEPWVRGRHETYLCYEVERMHNDTWVLLNQRRGFLCNQAPHKHGF
LEGRHAELCFLDVIPFWKLDLDQDYRVTCFTSWSPCFSCAQEMAK
FISKNKHVSLCIFTARIYDDQGRCQEGLRTLAEAGAKISIMTYSE
FKHCWDTFVDHQGCPFQPWDGLDEHSQDLSGRLRAILQNQENSGG
SSGGSSGSETPGTSESATPESSGGSSGGSDKKYSIGLAIGTNSVG
WAVITDEYKVPSKKFKVLGNTDRHSIKKNLIGALLFDSGETAEAT
RLKRTARRRYTRRKNRICYLQEIFSNEMAKVDDSFFHRLEESFLV
EEDKKHERHPIFGNIVDEVAYHEKYPTIYHLRKKLVDSTDKADLR
LIYLALAHMIKFRGHFLIEGDLNPDNSDVDKLFIQLVQTYNQLFE
ENPINASGVDAKAILSARLSKSRRLENLIAQLPGEKKNGLFGNLI
ALSLGLTPNFKSNFDLAEDAKLQLSKDTYDDDLDNLLAQIGDQYA
DLFLAAKNLSDAILLSDILRVNTEITKAPLSASMIKRYDEHHQDL
TLLKALVRQQLPEKYKEIFFDQSKNGYAGYIDGGASQEEFYKFIK
PILEKMDGTEELLVKLNREDLLRKQRTFDNGSIPHQIHLGELHAI
LRRQEDFYPFLKDNREKIEKILTFRIPYYVGPLARGNSRFAWMTR
KSEETITPWNFEEVVDKGASAQSFIERMTNFDKNLPNEKVLPKHS
LLYEYFTVYNELTKVKYVTEGMRKPAFLSGEQKKAIVDLLFKTNR
KVTVKQLKEDYFKKIECFDSVEISGVEDRFNASLGTYHDLLKIIK
DKDFLDNEENEDILEDIVLTLTLFEDREMIEERLKTYAHLFDDKV
MKQLKRRRYTGWGRLSRKLINGIRDKQSGKTILDFLKSDGFANRN
FMQLIHDDSLTFKEDIQKAQVSGQGDSLHEHIANLAGSPAIKKGI
LQTVKVVDELVKVMGRHKPENIVIEMARENQTTQKGQKNSRERMK
RIEEGIKELGSQILKEHPVENTQLQNEKLYLYYLQNGRDMYVDQE
LDINRLSDYDVDHIVPQSFLKDDSIDNKVLTRSDKNRGKSDNVPS
EEVVKKMKNYWRQLLNAKLITQRKFDNLTKAERGGLSELDKAGFI
KRQLVETRQITKHVAQILDSRMNTKYDENDKLIREVKVITLKSKL
VSDFRKDFQFYKVREINNYHHAHDAYLNAVVGTALIKKYPKLESE
FVYGDYKVYDVRKMIAKSEQEIGKATAKYFFYSNIMNFFKTEITL
ANGEIRKRPLIETNGETGEIVWDKGRDFATVRKVLSMPQVNIVKK
TEVQTGGFSKESIRPKRNSDKLIARKKDWDPKKYGGFVSPTVAYS
VLVVAKVEKGKSKKLKSVKELLGITIMERSSFEKNPIDFLEAKGY
KEVKKDEIIKLPKYSLFELENGRKRMLASARFLQKGNELALPSKY
VNFLYLASHYEKLKGSPEDNEQKQLFVEQHKHYLDEIIEQISEFS
KRVILADANLDKVLSAYNKHRDKPIREQAENIIHLFTLTNLGAPR
AFKYFDTTIDRKVYRTSTKEVLDATLIHQSITGLYETRIDLSQLG
GDSGGSGGSGGSTNLSDIIEKETGKQLVIQESILMLPEEVEEVIG
NKPESDILVHTAYDESTDENVMLLTSDAPEYKPWALVIQDSNGEN
KIKMLSGGSGGSGGSTNLSDIIEKETGKQLVIQESILMLPEEVEE
VIGNKPESDILVHTAYDESTDENVMLLTSDAPEYKPWALVIQDSN
GENKIKMLSGGSKRTADGSEFEPKKKRKV
AID-BE4
(SEQ ID NO: 360)
MKRTADGSEFESPKKKRKVDSLLMNRRKFLYQFKNVRWAKGRRET
YLCYVVKRRDSATSFSLDFGYLRNKNGCHVELLFLRYISDWDLDP
GRCYRVTWFTSWSPCYDCARHVADFLRGNPNLSLRIFTARLYFCE
DRKAEPEGLRRLHRAGVQIAIMTFKDYFYCWNTFVENHERTFKAW
EGLHENSVRLSRQLRRILLPLYEVDDLRDAFRTLGLSGGSSGGSS
GSEYPGYSESAYPESSGGSSGGSDKKYSIGLAIGTNSVGWAVITD
EYKVPSKKFKVLGNTDRHSIKKNLIGALLFDSGETAEATRLKRTA
RRRYTRRKNRICYLQEIFSNEMAKVDDSFFHRLEESFLVEEDKKH
ERHPIFGNIVDEVAYHEKYPTIYHLRKKLVDSTDKADLRLIYLAL
AHMIKFRGHFLIEGDLNPDNSDVDKLFIQLVQTYNQLFEENPINA
SGVDAKAILSARLSKSRRLENLIAQLPGEKKNGLFGNLIALSLGL
TPNFKSNFDLAEDAKLQLSKDTYDDDLDNLLAQIGDQYADLFLAA
KNLSDAILLSDILRVNTEITKAPLSASMIKRYDEHHQDLTLLKAL
VRQQLPEKYKEIFFDQSKNGYAGYIDGGASQEEFYKFIKPILEKM
DGTEELLVKLNREDLLRKQRTFDNGSIPHQIHLGELHAILRRQED
FYPFLKDNREKIEKILTFRIPYYVGPLARGNSRFAWMTRKSEETI
TPWNFEEVVDKGASAQSFIERMTNFDKNLPNEKVLPKHSLLYEYF
TVYNELTKVKYVTEGMRKPAFLSGEQKKAIVDLLFKTNRKVTVKQ
LKEDYFKKIECFDSVEISGVEDRFNASLGTYHDLLKIIKDKDFLD
NEENEDILEDIVLTLTLFEDREMIEERLKTYAHLFDDKVMKQLKR
RRYTGWGRLSRKLINGIRDKQSGKTILDFLKSDGFANRNFMQLIH
DDSLTFKEDIQKAQVSGQGDSLHEHIANLAGSPAIKKGILQTVKV
VDELVKVMGRHKPENIVIEMARENQTTQKGQKNSRERMKRIEEGI
KELGSQILKEHPVENTQLQNEKLYLYYLQNGRDMYVDQELDINRL
SDYDVDHIVPQSFLKDDSIDNKVLTRSDKNRGKSDNVPSEEVVKK
MKNYWRQLLNAKLITQRKFDNLTKAERGGLSELDKAGFIKRQLVE
TRQITKHVAQILDSRMNTKYDENDKLIREVKVITLKSKLVSDFRK
DFQFYKVREINNYHHAHDAYLNAVVGTALIKKYPKLESEFVYGDY
KVYDVRKMIAKSEQEIGKATAKYFFYSNIMNFFKTEITLANGEIR
KRPLIETNGETGEIVWDKGRDFATVRKVLSMPQVNIVKKTEVQTG
GFSKESIRPKRNSDKLIARKKDWDPKKYGGFVSPTVAYSVLVVAK
VEKGKSKKLKSVKELLGITIMERSSFEKNPIDFLEAKGYKEVKKD
EIIKLPKYSLFELENGRKRMLASARFLQKGNELALPSKYVNFLYL
ASHYEKLKGSPEDNEQKQLFVEQHKHYLDEIIEQISEFSKRVILA
DANLDKVLSAYNKHRDKPIREQAENIIHLFTLTNLGAPRAFKYFD
TTIDRKVYRTSTKEVLDATLIHQSITGLYETRIDLSQLGGDSGGS
GGSGGSYNLSDIIEKETGKQLVIQESILMLPEEVEEVIGNKPESD
ILVHTAYDESTDENVMLLTSDAPEYKPWALVIQDSNGENKIKMLS
GGSGGSGGSTNLSDIIEKETGKQLVIQESILMLPEEVEEVIGNKP
ESDILVHTAYDESTDENVMLLTSDAPEYKPWALVIQDSNGENKIK
MLSGGSKRTADGSEFEPKKKRKV
CDA-BE4
(SEQ ID NO: 361)
MKRTADGSEFESPKKKRKVTDAEYVRIHEKLDIYTFKKQFFNNKK
SVSHRCYVLFELKRRGERRACFWGYAVNKPQSGTERGIHAEIFSI
RKVEEYLRDNPGQFTINWYSSWSPCADCAEKILEWYNQELRGNGH
TLKIWACKLYYEKNARNQIGLWNLRDNGVGLNVMVSEHYQCCRKI
FIQSSHNQLNENRWLEKTLKRAEKRRSELSIMIQVKILHTTKSPA
NSGGSSGGSSGSEYPGYSESAYPESSGGSSGGSDKKYSIGLAIGT
NSVGWAVITDEYKVPSKKFKVLGNTDRHSIKKNLIGALLFDSGET
AEATRLKRTARRRYTRRKNRICYLQEIFSNEMAKVDDSFFHRLEE
SFLVEEDKKHERHPIFGNIVDEVAYHEKYPTIYHLRKKLVDSTDK
ADLRLIYLALAHMIKFRGHFLIEGDLNPDNSDVDKLFIQLVQTYN
QLFEENPINASGVDAKAILSARLSKSRRLENLIAQLPGEKKNGLF
GNLIALSLGLTPNFKSNFDLAEDAKLQLSKDTYDDDLDNLLAQIG
DQYADLFLAAKNLSDAILLSDILRVNTEITKAPLSASMIKRYDEH
HQDLTLLKALVRQQLPEKYKEIFFDQSKNGYAGYIDGGASQEEFY
KFIKPILEKMDGTEELLVKLNREDLLRKQRTFDNGSIPHQIHLGE
LHAILRRQEDFYPFLKDNREKIEKILTFRIPYYVGPLARGNSRFA
WMTRKSEETITPWNFEEVVDKGASAQSFIERMTNFDKNLPNEKVL
PKHSLLYEYFTVYNELTKVKYVTEGMRKPAFLSGEQKKAIVDLLF
KTNRKVTVKQLKEDYFKKIECFDSVEISGVEDRFNASLGTYHDLL
KIIKDKDFLDNEENEDILEDIVLTLTLFEDREMIEERLKTYAHLF
DDKVMKQLKRRRYTGWGRLSRKLINGIRDKQSGKTILDFLKSDGF
ANRNFMQLIHDDSLTFKEDIQKAQVSGQGDSLHEHIANLAGSPAI
KKGILQTVKVVDELVKVMGRHKPENIVIEMARENQTTQKGQKNSR
ERMKRIEEGIKELGSQILKEHPVENTQLQNEKLYLYYLQNGRDMY
VDQELDINRLSDYDVDHIVPQSFLKDDSIDNKVLTRSDKNRGKSD
NVPSEEVVKKMKNYWRQLLNAKLITQRKFDNLTKAERGGLSELDK
AGFIKRQLVETRQITKHVAQILDSRMNTKYDENDKLIREVKVITL
KSKLVSDFRKDFQFYKVREINNYHHAHDAYLNAVVGTALIKKYPK
LESEFVYGDYKVYDVRKMIAKSEQEIGKATAKYFFYSNIMNFFKT
EITLANGEIRKRPLIETNGETGEIVWDKGRDFATVRKVLSMPQVN
IVKKTEVQTGGFSKESIRPKRNSDKLIARKKDWDPKKYGGFVSPT
VAYSVLVVAKVEKGKSKKLKSVKELLGITIMERSSFEKNPIDFLE
AKGYKEVKKDEIIKLPKYSLFELENGRKRMLASARFLQKGNELAL
PSKYVNFLYLASHYEKLKGSPEDNEQKQLFVEQHKHYLDEIIEQI
SEFSKRVILADANLDKVLSAYNKHRDKPIREQAENIIHLFTLTNL
GAPRAFKYFDTTIDRKVYRTSTKEVLDATLIHQSITGLYETRIDL
SQLGGDSGGSGGSGGSTNLSDIIEKETGKQLVIQESILMLPEEVE
EVIGNKPESDILVHTAYDESTDENVMLLTSDAPEYKPWALVIQDS
NGENKIKMLSGGSGGSGGSTNLSDIIEKETGKQLVIQESILMLPE
EVEEVIGNKPESDILVHTAYDESTDENVMLLTSDAPEYKPWALVI
QDSNGENKIKMLSGGSKRTADGSEFEPKKKRKV
FERNY-BE4
(SEQ ID NO: 362)
MKRTADGSEFESPKKKRKVFERNYDPRELRKETYLLYEIKWGKSG
KLWRHWCQNNRTQHAEVYFLENIFNARRFNPSTHCSITWYLSWSP
CAECSQKIVDFLKEHPNVNLEIYVARLYYHEDERNRQGLRDLVNS
GVTIRIMDLPDYNYCWKTFVSDQGGDEDYWPGHFAPWIKQYSLKL
SGGSSGGSSGSETPGTSESATPESSGGSSGGSDKKYSIGLAIGTN
SVGWAVITDEYKVPSKKFKVLGNTDRHSIKKNLIGALLFDSGETA
EATRLKRTARRRYTRRKNRICYLQEIFSNEMAKVDDSFFHRLEES
FLVEEDKKHERHPIFGNIVDEVAYHEKYPTIYHLRKKLVDSTDKA
DLRLIYLALAHMIKFRGHFLIEGDLNPDNSDVDKLFIQLVQTYNQ
LFEENPINASGVDAKAILSARLSKSRRLENLIAQLPGEKKNGLFG
NLIALSLGLTPNFKSNFDLAEDAKLQLSKDTYDDDLDNLLAQIGD
QYADLFLAAKNLSDAILLSDILRVNTEITKAPLSASMIKRYDEHH
QDLTLLKALVRQQLPEKYKEIFFDQSKNGYAGYIDGGASQEEFYK
FIKPILEKMDGTEELLVKLNREDLLRKQRTFDNGSIPHQIHLGEL
HAILRRQEDFYPFLKDNREKIEKILTFRIPYYVGPLARGNSRFAW
MTRKSEETITPWNFEEVVDKGASAQSFIERMTNFDKNLPNEKVLP
KHSLLYEYFTVYNELTKVKYVTEGMRKPAFLSGEQKKAIVDLLFK
TNRKVTVKQLKEDYFKKIECFDSVEISGVEDRFNASLGTYHDLLK
IIKDKDFLDNEENEDILEDIVLTLTLFEDREMIEERLKTYAHLFD
DKVMKQLKRRRYTGWGRLSRKLINGIRDKQSGKTILDFLKSDGFA
NRNFMQLIHDDSLTFKEDIQKAQVSGQGDSLHEHIANLAGSPAIK
KGILQTVKVVDELVKVMGRHKPENIVIEMARENQTTQKGQKNSRE
RMKRIEEGIKELGSQILKEHPVENTQLQNEKLYLYYLQNGRDMYV
DQELDINRLSDYDVDHIVPQSFLKDDSIDNKVLTRSDKNRGKSDN
VPSEEVVKKMKNYWRQLLNAKLITQRKFDNLTKAERGGLSELDKA
GFIKRQLVETRQITKHVAQILDSRMNTKYDENDKLIREVKVITLK
SKLVSDFRKDFQFYKVREINNYHHAHDAYLNAVVGTALIKKYPKL
ESEFVYGDYKVYDVRKMIAKSEQEIGKATAKYFFYSNIMNFFKTE
ITLANGEIRKRPLIETNGETGEIVWDKGRDFATVRKVLSMPQVNI
VKKTEVQTGGFSKESIRPKRNSDKLIARKKDWDPKKYGGFVSPTV
AYSVLVVAKVEKGKSKKLKSVKELLGITIMERSSFEKNPIDFLEA
KGYKEVKKDEIIKLPKYSLFELENGRKRMLASARFLQKGNELALP
SKYVNFLYLASHYEKLKGSPEDNEQKQLFVEQHKHYLDEIIEQIS
EFSKRVILADANLDKVLSAYNKHRDKPIREQAENIIHLFTLTNLG
APRAFKYFDTTIDRKVYRTSTKEVLDATLIHQSITGLYETRIDLS
QLGGDSGGSGGSGGSTNLSDIIEKETGKQLVIQESILMLPEEVEE
VIGNKPESDILVHTAYDESTDENVMLLTSDAPEYKPWALVIQDSN
GENKIKMLSGGSGGSGGSTNLSDIIEKETGKQLVIQESILMLPEE
VEEVIGNKPESDILVHTAYDESTDENVMLLTSDAPEYKPWALVIQ
DSNGENKIKMLSGGSKRTADGSEFEPKKKRKV
Evolved APOBEC3A (eA3A)-BE4
(SEQ ID NO: 363)
MKRTADGSEFESPKKKRKVEASPASGPRHLMDPHIFTSNFNNGIG
RHKTYLCYEVERLDNGTSVKMDQHRGFLHGQAKNLLCGFYGRHAE
LRFLDLVPSLQLDPAQIYRVTWFISWSPCFSWGCAGEVRAFLQEN
THVRLRIFAARIYDYDPLYKEALQMLRDAGAQVSIMTYDEFKHCW
DTFVDHQGCPFQPWDGLDEHSQALSGRLRAILQNQGNSGGSSGGS
SGSEYPGYSESAYPESSGGSSGGSDKKYSIGLAIGTNSVGWAVIT
DEYKVPSKKFKVLGNTDRHSIKKNLIGALLFDSGETAEATRLKRT
ARRRYTRRKNRICYLQEIFSNEMAKVDDSFFHRLEESFLVEEDKK
HERHPIFGNIVDEVAYHEKYPTIYHLRKKLVDSTDKADLRLIYLA
LAHMIKFRGHFLIEGDLNPDNSDVDKLFIQLVQTYNQLFEENPIN
ASGVDAKAILSARLSKSRRLENLIAQLPGEKKNGLFGNLIALSLG
LTPNFKSNFDLAEDAKLQLSKDTYDDDLDNLLAQIGDQYADLFLA
AKNLSDAILLSDILRVNTEITKAPLSASMIKRYDEHHQDLTLLKA
LVRQQLPEKYKEIFFDQSKNGYAGYIDGGASQEEFYKFIKPILEK
MDGTEELLVKLNREDLLRKQRTFDNGSIPHQIHLGELHAILRRQE
DFYPFLKDNREKIEKILTFRIPYYVGPLARGNSRFAWMTRKSEET
ITPWNFEEVVDKGASAQSFIERMTNFDKNLPNEKVLPKHSLLYEY
FTVYNELTKVKYVTEGMRKPAFLSGEQKKAIVDLLFKTNRKVTVK
QLKEDYFKKIECFDSVEISGVEDRFNASLGTYHDLLKIIKDKDFL
DNEENEDILEDIVLTLTLFEDREMIEERLKTYAHLFDDKVMKQLK
RRRYTGWGRLSRKLINGIRDKQSGKTILDFLKSDGFANRNFMQLI
HDDSLTFKEDIQKAQVSGQGDSLHEHIANLAGSPAIKKGILQTVK
VVDELVKVMGRHKPENIVIEMARENQTTQKGQKNSRERMKRIEEG
IKELGSQILKEHPVENTQLQNEKLYLYYLQNGRDMYVDQELDINR
LSDYDVDHIVPQSFLKDDSIDNKVLTRSDKNRGKSDNVPSEEVVK
KMKNYWRQLLNAKLITQRKFDNLTKAERGGLSELDKAGFIKRQLV
ETRQITKHVAQILDSRMNTKYDENDKLIREVKVITLKSKLVSDFR
KDFQFYKVREINNYHHAHDAYLNAVVGTALIKKYPKLESEFVYGD
YKVYDVRKMIAKSEQEIGKATAKYFFYSNIMNFFKTEITLANGEI
RKRPLIETNGETGEIVWDKGRDFATVRKVLSMPQVNIVKKTEVQT
GGFSKESIRPKRNSDKLIARKKDWDPKKYGGFVSPTVAYSVLVVA
KVEKGKSKKLKSVKELLGITIMERSSFEKNPIDFLEAKGYKEVKK
DEIIKLPKYSLFELENGRKRMLASARFLQKGNELALPSKYVNFLY
LASHYEKLKGSPEDNEQKQLFVEQHKHYLDEIIEQISEFSKRVIL
ADANLDKVLSAYNKHRDKPIREQAENIIHLFTLTNLGAPRAFKYF
DTTIDRKVYRTSTKEVLDATLIHQSITGLYETRIDLSQLGGDSGG
SGGSGGSYNLSDIIEKETGKQLVIQESILMLPEEVEEVIGNKPES
DILVHTAYDESTDENVMLLTSDAPEYKPWALVIQDSNGENKIKML
SGGSGGSGGSTNLSDIIEKETGKQLVIQESILMLPEEVEEVIGNK
PESDILVHTAYDESTDENVMLLTSDAPEYKPWALVIQDSNGENKI
KMLSGGSKRTADGSEFEPKKKRKV
AALN-BE4
(SEQ ID NO: 364)
MKRTADGSEFESPKKKRKVSSETGPVAVDPTLRRRIEPHEFEVFF
DPRELAAETCLLYEINWGGRHSIWRHTSQNTNKHVEVNFIEKFTT
ERYFCPNTRCSITWFLSWSPCGECSRAITEFLSRYPHVTLFIYIA
RLYHLANPRNRQGLRDLISSGVTIQIMTEQESGYCWRNFVNYSPS
NEAHWPRYPHLWVRLYVLELYCIILGLPPCLNILRRKQPQLTFFT
IALQSCHYQRLPPHILWATGLKSGGSSGGSSGSETPGTSESATPE
SSGGSSGGSDKKYSIGLAIGTNSVGWAVITDEYKVPSKKFKVLGN
TDRHSIKKNLIGALLFDSGETAEATRLKRTARRRYTRRKNRICYL
QEIFSNEMAKVDDSFFHRLEESFLVEEDKKHERHPIFGNIVDEVA
YHEKYPTIYHLRKKLVDSTDKADLRLIYLALAHMIKFRGHFLIEG
DLNPDNSDVDKLFIQLVQTYNQLFEENPINASGVDAKAILSARLS
KSRRLENLIAQLPGEKKNGLFGNLIALSLGLTPNFKSNFDLAEDA
KLQLSKDTYDDDLDNLLAQIGDQYADLFLAAKNLSDAILLSDILR
VNTEITKAPLSASMIKRYDEHHQDLTLLKALVRQQLPEKYKEIFF
DQSKNGYAGYIDGGASQEEFYKFIKPILEKMDGTEELLVKLNRED
LLRKQRTFDNGSIPHQIHLGELHAILRRQEDFYPFLKDNREKIEK
ILTFRIPYYVGPLARGNSRFAWMTRKSEETITPWNFEEVVDKGAS
AQSFIERMTNFDKNLPNEKVLPKHSLLYEYFTVYNELTKVKYVTE
GMRKPAFLSGEQKKAIVDLLFKTNRKVTVKQLKEDYFKKIECFDS
VEISGVEDRFNASLGTYHDLLKIIKDKDFLDNEENEDILEDIVLT
LTLFEDREMIEERLKTYAHLFDDKVMKQLKRRRYTGWGRLSRKLI
NGIRDKQSGKTILDFLKSDGFANRNFMQLIHDDSLTFKEDIQKAQ
VSGQGDSLHEHIANLAGSPAIKKGILQTVKVVDELVKVMGRHKPE
NIVIEMARENQTTQKGQKNSRERMKRIEEGIKELGSQILKEHPVE
NTQLQNEKLYLYYLQNGRDMYVDQELDINRLSDYDVDHIVPQSFL
KDDSIDNKVLTRSDKNRGKSDNVPSEEVVKKMKNYWRQLLNAKLI
TQRKFDNLTKAERGGLSELDKAGFIKRQLVETRQITKHVAQILDS
RMNTKYDENDKLIREVKVITLKSKLVSDFRKDFQFYKVREINNYH
HAHDAYLNAVVGTALIKKYPKLESEFVYGDYKVYDVRKMIAKSEQ
EIGKATAKYFFYSNIMNFFKTEITLANGEIRKRPLIETNGETGEI
VWDKGRDFATVRKVLSMPQVNIVKKTEVQTGGFSKESIRPKRNSD
KLIARKKDWDPKKYGGFVSPTVAYSVLVVAKVEKGKSKKLKSVKE
LLGITIMERSSFEKNPIDFLEAKGYKEVKKDEIIKLPKYSLFELE
NGRKRMLASARFLQKGNELALPSKYVNFLYLASHYEKLKGSPEDN
EQKQLFVEQHKHYLDEIIEQISEFSKRVILADANLDKVLSAYNKH
RDKPIREQAENIIHLFTLTNLGAPRAFKYFDTTIDRKVYRTSTKE
VLDATLIHQSITGLYETRIDLSQLGGDSGGSGGSGGSTNLSDIIE
KETGKQLVIQESILMLPEEVEEVIGNKPESDILVHTAYDESTDEN
VMLLTSDAPEYKPWALVIQDSNGENKIKMLSGGSGGSGGSTNLSD
IIEKETGKQLVIQESILMLPEEVEEVIGNKPESDILVHTAYDEST
DENVMLLTSDAPEYKPWALVIQDSNGENKIKMLSGGSKRTADGSE
FEPKKKRKV
BE4max, modified with SpCas9-NG
(SEQ ID NO: 365)
MKRTADGSEFESPKKKRKVSSETGPVAVDPTLRRRIEPHEFEVFF
DPRELRKETCLLYEINWGGRHSIWRHTSQNTNKHVEVNFIEKFTT
ERYFCPNTRCSITWFLSWSPCGECSRAITEFLSRYPHVTLFIYIA
RLYHHADPRNRQGLRDLISSGVTIQIMTEQESGYCWRNFVNYSPS
NEAHWPRYPHLWVRLYVLELYCIILGLPPCLNILRRKQPQLTFFT
IALQSCHYQRLPPHILWATGLKSGGSSGGSSGSETPGTSESATPE
SSGGSSGGSDKKYSIGLAIGTNSVGWAVITDEYKVPSKKFKVLGN
TDRHSIKKNLIGALLFDSGETAEATRLKRTARRRYTRRKNRICYL
QEIFSNEMAKVDDSFFHRLEESFLVEEDKKHERHPIFGNIVDEVA
YHEKYPTIYHLRKKLVDSTDKADLRLIYLALAHMIKFRGHFLIEG
DLNPDNSDVDKLFIQLVQTYNQLFEENPINASGVDAKAILSARLS
KSRRLENLIAQLPGEKKNGLFGNLIALSLGLTPNFKSNFDLAEDA
KLQLSKDTYDDDLDNLLAQIGDQYADLFLAAKNLSDAILLSDILR
VNTEITKAPLSASMIKRYDEHHQDLTLLKALVRQQLPEKYKEIFF
DQSKNGYAGYIDGGASQEEFYKFIKPILEKMDGTEELLVKLNRED
LLRKQRTFDNGSIPHQIHLGELHAILRRQEDFYPFLKDNREKIEK
ILTFRIPYYVGPLARGNSRFAWMTRKSEETITPWNFEEVVDKGAS
AQSFIERMTNFDKNLPNEKVLPKHSLLYEYFTVYNELTKVKYVTE
GMRKPAFLSGEQKKAIVDLLFKTNRKVTVKQLKEDYFKKIECFDS
VEISGVEDRFNASLGTYHDLLKIIKDKDFLDNEENEDILEDIVLT
LTLFEDREMIEERLKTYAHLFDDKVMKQLKRRRYTGWGRLSRKLI
NGIRDKQSGKTILDFLKSDGFANRNFMQLIHDDSLTFKEDIQKAQ
VSGQGDSLHEHIANLAGSPAIKKGILQTVKVVDELVKVMGRHKPE
NIVIEMARENQTTQKGQKNSRERMKRIEEGIKELGSQILKEHPVE
NTQLQNEKLYLYYLQNGRDMYVDQELDINRLSDYDVDHIVPQSFL
KDDSIDNKVLTRSDKNRGKSDNVPSEEVVKKMKNYWRQLLNAKLI
TQRKFDNLTKAERGGLSELDKAGFIKRQLVETRQITKHVAQILDS
RMNTKYDENDKLIREVKVITLKSKLVSDFRKDFQFYKVREINNYH
HAHDAYLNAVVGTALIKKYPKLESEFVYGDYKVYDVRKMIAKSEQ
EIGKATAKYFFYSNIMNFFKTEITLANGEIRKRPLIETNGETGEI
VWDKGRDFATVRKVLSMPQVNIVKKTEVQTGGFSKESIRPKRNSD
KLIARKKDWDPKKYGGFVSPTVAYSVLVVAKVEKGKSKKLKSVKE
LLGITIMERSSFEKNPIDFLEAKGYKEVKKDEIIKLPKYSLFELE
NGRKRMLASARFLQKGNELALPSKYVNFLYLASHYEKLKGSPEDN
EQKQLFVEQHKHYLDEIIEQISEFSKRVILADANLDKVLSAYNKH
RDKPIREQAENIIHLFTLTNLGAPRAFKYFDTTIDRKVYRTSTKE
VLDATLIHQSITGLYETRIDLSQLGGDSGGSGGSGGSTNLSDIIE
KETGKQLVIQESILMLPEEVEEVIGNKPESDILVHTAYDESTDEN
VMLLTSDAPEYKPWALVIQDSNGENKIKMLSGGSGGSGGSTNLSD
IIEKETGKQLVIQESILMLPEEVEEVIGNKPESDILVHTAYDEST
DENVMLLTSDAPEYKPWALVIQDSNGENKIKMLSGGSKRTADGSE
FEPKKKRKV
YE1-SpCas9-NG base editor (YE1-NG)
(SEQ ID NO: 366)
MKRTADGSEFESPKKKRKVSSETGPVAVDPTLRRRIEPHEFEVFF
DPRELRKETCLLYEINWGGRHSIWRHTSQNTNKHVEVNFIEKFTT
ERYFCPNTRCSITWFLSYSPCGECSRAITEFLSRYPHVTLFIYIA
RLYHHADPENRQGLRDLISSGVTIQIMTEQESGYCWRNFVNYSPS
NEAHWPRYPHLWVRLYVLELYCIILGLPPCLNILRRKQPQLTFFT
IALQSCHYQRLPPHILWATGLKSGGSSGGSSGSETPGTSESATPE
SSGGSSGGSDKKYSIGLAIGTNSVGWAVITDEYKVPSKKFKVLGN
TDRHSIKKNLIGALLFDSGETAEATRLKRTARRRYTRRKNRICYL
QEIFSNEMAKVDDSFFHRLEESFLVEEDKKHERHPIFGNIVDEVA
YHEKYPTIYHLRKKLVDSTDKADLRLIYLALAHMIKFRGHFLIEG
DLNPDNSDVDKLFIQLVQTYNQLFEENPINASGVDAKAILSARLS
KSRRLENLIAQLPGEKKNGLFGNLIALSLGLTPNFKSNFDLAEDA
KLQLSKDTYDDDLDNLLAQIGDQYADLFLAAKNLSDAILLSDILR
VNTEITKAPLSASMIKRYDEHHQDLTLLKALVRQQLPEKYKEIFF
DQSKNGYAGYIDGGASQEEFYKFIKPILEKMDGTEELLVKLNRED
LLRKQRTFDNGSIPHQIHLGELHAILRRQEDFYPFLKDNREKIEK
ILTFRIPYYVGPLARGNSRFAWMTRKSEETITPWNFEEVVDKGAS
AQSFIERMTNFDKNLPNEKVLPKHSLLYEYFTVYNELTKVKYVTE
GMRKPAFLSGEQKKAIVDLLFKTNRKVTVKQLKEDYFKKIECFDS
VEISGVEDRFNASLGTYHDLLKIIKDKDFLDNEENEDILEDIVLT
LTLFEDREMIEERLKTYAHLFDDKVMKQLKRRRYTGWGRLSRKLI
NGIRDKQSGKTILDFLKSDGFANRNFMQLIHDDSLTFKEDIQKAQ
VSGQGDSLHEHIANLAGSPAIKKGILQTVKVVDELVKVMGRHKPE
NIVIEMARENQTTQKGQKNSRERMKRIEEGIKELGSQILKEHPVE
NTQLQNEKLYLYYLQNGRDMYVDQELDINRLSDYDVDHIVPQSFL
KDDSIDNKVLTRSDKNRGKSDNVPSEEVVKKMKNYWRQLLNAKLI
TQRKFDNLTKAERGGLSELDKAGFIKRQLVETRQITKHVAQILDS
RMNTKYDENDKLIREVKVITLKSKLVSDFRKDFQFYKVREINNYH
HAHDAYLNAVVGTALIKKYPKLESEFVYGDYKVYDVRKMIAKSEQ
EIGKATAKYFFYSNIMNFFKTEITLANGEIRKRPLIETNGETGEI
VWDKGRDFATVRKVLSMPQVNIVKKTEVQTGGFSKESIRPKRNSD
KLIARKKDWDPKKYGGFVSPTVAYSVLVVAKVEKGKSKKLKSVKE
LLGITIMERSSFEKNPIDFLEAKGYKEVKKDEIIKLPKYSLFELE
NGRKRMLASARFLQKGNELALPSKYVNFLYLASHYEKLKGSPEDN
EQKQLFVEQHKHYLDEIIEQISEFSKRVILADANLDKVLSAYNKH
RDKPIREQAENIIHLFTLTNLGAPRAFKYFDTTIDRKVYRTSTKE
VLDATLIHQSITGLYETRIDLSQLGGDSGGSGGSGGSTNLSDIIE
KETGKQLVIQESILMLPEEVEEVIGNKPESDILVHTAYDESTDEN
VMLLTSDAPEYKPWALVIQDSNGENKIKMLSGGSGGSGGSTNLSD
IIEKETGKQLVIQESILMLPEEVEEVIGNKPESDILVHTAYDEST
DENVMLLTSDAPEYKPWALVIQDSNGENKIKMLSGGSKRTADGSE
FEPKKKRKV
YE2-SpCas9-NG base editor
(SEQ ID NO: 367)
MKRTADGSEFESPKKKRKVSSETGPVAVDPTLRRRIEPHEFEVFF
DPRELRKETCLLYEINWGGRHSIWRHTSQNTNKHVEVNFIEKFTT
ERYFCPNTRCSITWFLSYSPCGECSRAITEFLSRYPHVTLFIYIA
RLYHHADPRNRQGLEDLISSGVTIQIMTEQESGYCWRNFVNYSPS
NEAHWPRYPHLWVRLYVLELYCIILGLPPCLNILRRKQPQLTFFT
IALQSCHYQRLPPHILWATGLKSGGSSGGSSGSETPGTSESATPE
SSGGSSGGSDKKYSIGLAIGTNSVGWAVITDEYKVPSKKFKVLGN
TDRHSIKKNLIGALLFDSGETAEATRLKRTARRRYTRRKNRICYL
QEIFSNEMAKVDDSFFHRLEESFLVEEDKKHERHPIFGNIVDEVA
YHEKYPTIYHLRKKLVDSTDKADLRLIYLALAHMIKFRGHFLIEG
DLNPDNSDVDKLFIQLVQTYNQLFEENPINASGVDAKAILSARLS
KSRRLENLIAQLPGEKKNGLFGNLIALSLGLTPNFKSNFDLAEDA
KLQLSKDTYDDDLDNLLAQIGDQYADLFLAAKNLSDAILLSDILR
VNTEITKAPLSASMIKRYDEHHQDLTLLKALVRQQLPEKYKEIFF
DQSKNGYAGYIDGGASQEEFYKFIKPILEKMDGTEELLVKLNRED
LLRKQRTFDNGSIPHQIHLGELHAILRRQEDFYPFLKDNREKIEK
ILTFRIPYYVGPLARGNSRFAWMTRKSEETITPWNFEEVVDKGAS
AQSFIERMTNFDKNLPNEKVLPKHSLLYEYFTVYNELTKVKYVTE
GMRKPAFLSGEQKKAIVDLLFKTNRKVTVKQLKEDYFKKIECFDS
VEISGVEDRFNASLGTYHDLLKIIKDKDFLDNEENEDILEDIVLT
LTLFEDREMIEERLKTYAHLFDDKVMKQLKRRRYTGWGRLSRKLI
NGIRDKQSGKTILDFLKSDGFANRNFMQLIHDDSLTFKEDIQKAQ
VSGQGDSLHEHIANLAGSPAIKKGILQTVKVVDELVKVMGRHKPE
NIVIEMARENQTTQKGQKNSRERMKRIEEGIKELGSQILKEHPVE
NTQLQNEKLYLYYLQNGRDMYVDQELDINRLSDYDVDHIVPQSFL
KDDSIDNKVLTRSDKNRGKSDNVPSEEVVKKMKNYWRQLLNAKLI
TQRKFDNLTKAERGGLSELDKAGFIKRQLVETRQITKHVAQILDS
RMNTKYDENDKLIREVKVITLKSKLVSDFRKDFQFYKVREINNYH
HAHDAYLNAVVGTALIKKYPKLESEFVYGDYKVYDVRKMIAKSEQ
EIGKATAKYFFYSNIMNFFKTEITLANGEIRKRPLIETNGETGEI
VWDKGRDFATVRKVLSMPQVNIVKKTEVQTGGFSKESIRPKRNSD
KLIARKKDWDPKKYGGFVSPTVAYSVLVVAKVEKGKSKKLKSVKE
LLGITIMERSSFEKNPIDFLEAKGYKEVKKDEIIKLPKYSLFELE
NGRKRMLASARFLQKGNELALPSKYVNFLYLASHYEKLKGSPEDN
EQKQLFVEQHKHYLDEIIEQISEFSKRVILADANLDKVLSAYNKH
RDKPIREQAENIIHLFTLTNLGAPRAFKYFDTTIDRKVYRTSTKE
VLDATLIHQSITGLYETRIDLSQLGGDSGGSGGSGGSTNLSDIIE
KETGKQLVIQESILMLPEEVEEVIGNKPESDILVHTAYDESTDEN
VMLLTSDAPEYKPWALVIQDSNGENKIKMLSGGSGGSGGSTNLSD
IIEKETGKQLVIQESILMLPEEVEEVIGNKPESDILVHTAYDEST
DENVMLLTSDAPEYKPWALVIQDSNGENKIKMLSGGSKRTADGSE
FEPKKKRKV
YEE-SpCas9-NG base editor
(SEQ ID NO: 368)
MKRTADGSEFESPKKKRKVSSETGPVAVDPTLRRRIEPHEFEVFF
DPRELRKETCLLYEINWGGRHSIWRHTSQNTNKHVEVNFIEKFTT
ERYFCPNTRCSITWFLSYSPCGECSRAITEFLSRYPHVTLFIYIA
RLYHHADPENRQGLEDLISSGVTIQIMTEQESGYCWRNFVNYSPS
NEAHWPRYPHLWVRLYVLELYCIILGLPPCLNILRRKQPQLTFFT
IALQSCHYQRLPPHILWATGLKSGGSSGGSSGSETPGTSESATPE
SSGGSSGGSDKKYSIGLAIGTNSVGWAVITDEYKVPSKKFKVLGN
TDRHSIKKNLIGALLFDSGETAEATRLKRTARRRYTRRKNRICYL
QEIFSNEMAKVDDSFFHRLEESFLVEEDKKHERHPIFGNIVDEVA
YHEKYPTIYHLRKKLVDSTDKADLRLIYLALAHMIKFRGHFLIEG
DLNPDNSDVDKLFIQLVQTYNQLFEENPINASGVDAKAILSARLS
KSRRLENLIAQLPGEKKNGLFGNLIALSLGLTPNFKSNFDLAEDA
KLQLSKDTYDDDLDNLLAQIGDQYADLFLAAKNLSDAILLSDILR
VNTEITKAPLSASMIKRYDEHHQDLTLLKALVRQQLPEKYKEIFF
DQSKNGYAGYIDGGASQEEFYKFIKPILEKMDGTEELLVKLNRED
LLRKQRTFDNGSIPHQIHLGELHAILRRQEDFYPFLKDNREKIEK
ILTFRIPYYVGPLARGNSRFAWMTRKSEETITPWNFEEVVDKGAS
AQSFIERMTNFDKNLPNEKVLPKHSLLYEYFTVYNELTKVKYVTE
GMRKPAFLSGEQKKAIVDLLFKTNRKVTVKQLKEDYFKKIECFDS
VEISGVEDRFNASLGTYHDLLKIIKDKDFLDNEENEDILEDIVLT
LTLFEDREMIEERLKTYAHLFDDKVMKQLKRRRYTGWGRLSRKLI
NGIRDKQSGKTILDFLKSDGFANRNFMQLIHDDSLTFKEDIQKAQ
VSGQGDSLHEHIANLAGSPAIKKGILQTVKVVDELVKVMGRHKPE
NIVIEMARENQTTQKGQKNSRERMKRIEEGIKELGSQILKEHPVE
NTQLQNEKLYLYYLQNGRDMYVDQELDINRLSDYDVDHIVPQSFL
KDDSIDNKVLTRSDKNRGKSDNVPSEEVVKKMKNYWRQLLNAKLI
TQRKFDNLTKAERGGLSELDKAGFIKRQLVETRQITKHVAQILDS
RMNTKYDENDKLIREVKVITLKSKLVSDFRKDFQFYKVREINNYH
HAHDAYLNAVVGTALIKKYPKLESEFVYGDYKVYDVRKMIAKSEQ
EIGKATAKYFFYSNIMNFFKTEITLANGEIRKRPLIETNGETGEI
VWDKGRDFATVRKVLSMPQVNIVKKTEVQTGGFSKESIRPKRNSD
KLIARKKDWDPKKYGGFVSPTVAYSVLVVAKVEKGKSKKLKSVKE
LLGITIMERSSFEKNPIDFLEAKGYKEVKKDEIIKLPKYSLFELE
NGRKRMLASARFLQKGNELALPSKYVNFLYLASHYEKLKGSPEDN
EQKQLFVEQHKHYLDEIIEQISEFSKRVILADANLDKVLSAYNKH
RDKPIREQAENIIHLFTLTNLGAPRAFKYFDTTIDRKVYRTSTKE
VLDATLIHQSITGLYETRIDLSQLGGDSGGSGGSGGSTNLSDIIE
KETGKQLVIQESILMLPEEVEEVIGNKPESDILVHTAYDESTDEN
VMLLTSDAPEYKPWALVIQDSNGENKIKMLSGGSGGSGGSTNLSD
IIEKETGKQLVIQESILMLPEEVEEVIGNKPESDILVHTAYDEST
DENVMLLTSDAPEYKPWALVIQDSNGENKIKMLSGGSKRTADGSE
FEPKKKRKV
EE-SpCas9-NG base editor
(SEQ ID NO: 369)
MKRTADGSEFESPKKKRKVSSETGPVAVDPTLRRRIEPHEFEVFF
DPRELRKETCLLYEINWGGRHSIWRHTSQNTNKHVEVNFIEKFTT
ERYFCPNTRCSITWFLSWSPCGECSRAITEFLSRYPHVTLFIYIA
RLYHHADPENRQGLEDLISSGVTIQIMTEQESGYCWRNFVNYSPS
NEAHWPRYPHLWVRLYVLELYCIILGLPPCLNILRRKQPQLTFFT
IALQSCHYQRLPPHILWATGLKSGGSSGGSSGSETPGTSESATPE
SSGGSSGGSDKKYSIGLAIGTNSVGWAVITDEYKVPSKKFKVLGN
TDRHSIKKNLIGALLFDSGETAEATRLKRTARRRYTRRKNRICYL
QEIFSNEMAKVDDSFFHRLEESFLVEEDKKHERHPIFGNIVDEVA
YHEKYPTIYHLRKKLVDSTDKADLRLIYLALAHMIKFRGHFLIEG
DLNPDNSDVDKLFIQLVQTYNQLFEENPINASGVDAKAILSARLS
KSRRLENLIAQLPGEKKNGLFGNLIALSLGLTPNFKSNFDLAEDA
KLQLSKDTYDDDLDNLLAQIGDQYADLFLAAKNLSDAILLSDILR
VNTEITKAPLSASMIKRYDEHHQDLTLLKALVRQQLPEKYKEIFF
DQSKNGYAGYIDGGASQEEFYKFIKPILEKMDGTEELLVKLNRED
LLRKQRTFDNGSIPHQIHLGELHAILRRQEDFYPFLKDNREKIEK
ILTFRIPYYVGPLARGNSRFAWMTRKSEETITPWNFEEVVDKGAS
AQSFIERMTNFDKNLPNEKVLPKHSLLYEYFTVYNELTKVKYVTE
GMRKPAFLSGEQKKAIVDLLFKTNRKVTVKQLKEDYFKKIECFDS
VEISGVEDRFNASLGTYHDLLKIIKDKDFLDNEENEDILEDIVLT
LTLFEDREMIEERLKTYAHLFDDKVMKQLKRRRYTGWGRLSRKLI
NGIRDKQSGKTILDFLKSDGFANRNFMQLIHDDSLTFKEDIQKAQ
VSGQGDSLHEHIANLAGSPAIKKGILQTVKVVDELVKVMGRHKPE
NIVIEMARENQTTQKGQKNSRERMKRIEEGIKELGSQILKEHPVE
NTQLQNEKLYLYYLQNGRDMYVDQELDINRLSDYDVDHIVPQSFL
KDDSIDNKVLTRSDKNRGKSDNVPSEEVVKKMKNYWRQLLNAKLI
TQRKFDNLTKAERGGLSELDKAGFIKRQLVETRQITKHVAQILDS
RMNTKYDENDKLIREVKVITLKSKLVSDFRKDFQFYKVREINNYH
HAHDAYLNAVVGTALIKKYPKLESEFVYGDYKVYDVRKMIAKSEQ
EIGKATAKYFFYSNIMNFFKTEITLANGEIRKRPLIETNGETGEI
VWDKGRDFATVRKVLSMPQVNIVKKTEVQTGGFSKESIRPKRNSD
KLIARKKDWDPKKYGGFVSPTVAYSVLVVAKVEKGKSKKLKSVKE
LLGITIMERSSFEKNPIDFLEAKGYKEVKKDEIIKLPKYSLFELE
NGRKRMLASARFLQKGNELALPSKYVNFLYLASHYEKLKGSPEDN
EQKQLFVEQHKHYLDEIIEQISEFSKRVILADANLDKVLSAYNKH
RDKPIREQAENIIHLFTLTNLGAPRAFKYFDTTIDRKVYRTSTKE
VLDATLIHQSITGLYETRIDLSQLGGDSGGSGGSGGSTNLSDIIE
KETGKQLVIQESILMLPEEVEEVIGNKPESDILVHTAYDESTDEN
VMLLTSDAPEYKPWALVIQDSNGENKIKMLSGGSGGSGGSTNLSD
IIEKETGKQLVIQESILMLPEEVEEVIGNKPESDILVHTAYDEST
DENVMLLTSDAPEYKPWALVIQDSNGENKIKMLSGGSKRTADGSE
FEPKKKRKV
R33A + K34A-SpCas9-NG base editor
(SEQ ID NO: 370)
MKRTADGSEFESPKKKRKVSSETGPVAVDPTLRRRIEPHEFEVFF
DPRELAAETCLLYEINWGGRHSIWRHTSQNTNKHVEVNFIEKFTT
ERYFCPNTRCSITWFLSWSPCGECSRAITEFLSRYPHVTLFIYIA
RLYHHADPRNRQGLRDLISSGVTIQIMTEQESGYCWRNFVNYSPS
NEAHWPRYPHLWVRLYVLELYCIILGLPPCLNILRRKQPQLTFFT
IALQSCHYQRLPPHILWATGLKSGGSSGGSSGSETPGTSESATPE
SSGGSSGGSDKKYSIGLAIGTNSVGWAVITDEYKVPSKKFKVLGN
TDRHSIKKNLIGALLFDSGETAEATRLKRTARRRYTRRKNRICYL
QEIFSNEMAKVDDSFFHRLEESFLVEEDKKHERHPIFGNIVDEVA
YHEKYPTIYHLRKKLVDSTDKADLRLIYLALAHMIKFRGHFLIEG
DLNPDNSDVDKLFIQLVQTYNQLFEENPINASGVDAKAILSARLS
KSRRLENLIAQLPGEKKNGLFGNLIALSLGLTPNFKSNFDLAEDA
KLQLSKDTYDDDLDNLLAQIGDQYADLFLAAKNLSDAILLSDILR
VNTEITKAPLSASMIKRYDEHHQDLTLLKALVRQQLPEKYKEIFF
DQSKNGYAGYIDGGASQEEFYKFIKPILEKMDGTEELLVKLNRED
LLRKQRTFDNGSIPHQIHLGELHAILRRQEDFYPFLKDNREKIEK
ILTFRIPYYVGPLARGNSRFAWMTRKSEETITPWNFEEVVDKGAS
AQSFIERMTNFDKNLPNEKVLPKHSLLYEYFTVYNELTKVKYVTE
GMRKPAFLSGEQKKAIVDLLFKTNRKVTVKQLKEDYFKKIECFDS
VEISGVEDRFNASLGTYHDLLKIIKDKDFLDNEENEDILEDIVLT
LTLFEDREMIEERLKTYAHLFDDKVMKQLKRRRYTGWGRLSRKLI
NGIRDKQSGKTILDFLKSDGFANRNFMQLIHDDSLTFKEDIQKAQ
VSGQGDSLHEHIANLAGSPAIKKGILQTVKVVDELVKVMGRHKPE
NIVIEMARENQTTQKGQKNSRERMKRIEEGIKELGSQILKEHPVE
NTQLQNEKLYLYYLQNGRDMYVDQELDINRLSDYDVDHIVPQSFL
KDDSIDNKVLTRSDKNRGKSDNVPSEEVVKKMKNYWRQLLNAKLI
TQRKFDNLTKAERGGLSELDKAGFIKRQLVETRQITKHVAQILDS
RMNTKYDENDKLIREVKVITLKSKLVSDFRKDFQFYKVREINNYH
HAHDAYLNAVVGTALIKKYPKLESEFVYGDYKVYDVRKMIAKSEQ
EIGKATAKYFFYSNIMNFFKTEITLANGEIRKRPLIETNGETGEI
VWDKGRDFATVRKVLSMPQVNIVKKTEVQTGGFSKESIRPKRNSD
KLIARKKDWDPKKYGGFVSPTVAYSVLVVAKVEKGKSKKLKSVKE
LLGITIMERSSFEKNPIDFLEAKGYKEVKKDEIIKLPKYSLFELE
NGRKRMLASARFLQKGNELALPSKYVNFLYLASHYEKLKGSPEDN
EQKQLFVEQHKHYLDEIIEQISEFSKRVILADANLDKVLSAYNKH
RDKPIREQAENIIHLFTLTNLGAPRAFKYFDTTIDRKVYRTSTKE
VLDATLIHQSITGLYETRIDLSQLGGDSGGSGGSGGSTNLSDIIE
KETGKQLVIQESILMLPEEVEEVIGNKPESDILVHTAYDESTDEN
VMLLTSDAPEYKPWALVIQDSNGENKIKMLSGGSGGSGGSTNLSD
IIEKETGKQLVIQESILMLPEEVEEVIGNKPESDILVHTAYDEST
DENVMLLTSDAPEYKPWALVIQDSNGENKIKMLSGGSKRTADGSE
FEPKKKRKV
YE1-CP1028 base editor
(YE1-BE4-CP1028, or YE1-CP)
(SEQ ID NO: 371)
MKRTADGSEFESPKKKRKVSSETGPVAVDPTLRRRIEPHEFEVFF
DPRELRKETCLLYEINWGGRHSIWRHTSQNTNKHVEVNFIEKFTT
ERYFCPNTRCSITWFLSYSPCGECSRAITEFLSRYPHVTLFIYIA
RLYHHADPENRQGLRDLISSGVTIQIMTEQESGYCWRNFVNYSPS
NEAHWPRYPHLWVRLYVLELYCIILGLPPCLNILRRKQPQLTFFT
IALQSCHYQRLPPHILWATGLKSGGSSGGSSGSETPGTSESATPE
SSGGSSGGSEIGKATAKYFFYSNIMNFFKTEITLANGEIRKRPLI
ETNGETGEIVWDKGRDFATVRKVLSMPQVNIVKKTEVQTGGFSKE
SILPKRNSDKLIARKKDWDPKKYGGFDSPTVAYSVLVVAKVEKGK
SKKLKSVKELLGITIMERSSFEKNPIDFLEAKGYKEVKKDLIIKL
PKYSLFELENGRKRMLASAGELQKGNELALPSKYVNFLYLASHYE
KLKGSPEDNEQKQLFVEQHKHYLDEIIEQISEFSKRVILADANLD
KVLSAYNKHRDKPIREQAENIIHLFTLTNLGAPAAFKYFDTTIDR
KRYTSTKEVLDATLIHQSITGLYETRIDLSQLGGDGGSGGSGGSG
GSGGSGGSGGMDKKYSIGLAIGTNSVGWAVITDEYKVPSKKFKVL
GNTDRHSIKKNLIGALLFDSGETAEATRLKRTARRRYTRRKNRIC
YLQEIFSNEMAKVDDSFFHRLEESFLVEEDKKHERHPIFGNIVDE
VAYHEKYPTIYHLRKKLVDSTDKADLRLIYLALAHMIKFRGHFLI
EGDLNPDNSDVDKLFIQLVQTYNQLFEENPINASGVDAKAILSAR
LSKSRRLENLIAQLPGEKKNGLFGNLIALSLGLTPNFKSNFDLAE
DAKLQLSKDTYDDDLDNLLAQIGDQYADLFLAAKNLSDAILLSDI
LRVNTEITKAPLSASMIKRYDEHHQDLTLLKALVRQQLPEKYKEI
FFDQSKNGYAGYIDGGASQEEFYKFIKPILEKMDGTEELLVKLNR
EDLLRKQRTFDNGSIPHQIHLGELHAILRRQEDFYPFLKDNREKI
EKILTFRIPYYVGPLARGNSRFAWMTRKSEETITPWNFEEVVDKG
ASAQSFIERMTNFDKNLPNEKVLPKHSLLYEYFTVYNELTKVKYV
TEGMRKPAFLSGEQKKAIVDLLFKTNRKVTVKQLKEDYFKKIECF
DSVEISGVEDRFNASLGTYHDLLKIIKDKDFLDNEENEDILEDIV
LTLTLFEDREMIEERLKTYAHLFDDKVMKQLKRRRYTGWGRLSRK
LINGIRDKQSGKTILDFLKSDGFANRNFMQLIHDDSLTFKEDIQK
AQVSGQGDSLHEHIANLAGSPAIKKGILQTVKVVDELVKVMGRHK
PENIVIEMARENQTTQKGQKNSRERMKRIEEGIKELGSQILKEHP
VENTQLQNEKLYLYYLQNGRDMYVDQELDINRLSDYDVDHIVPQS
FLKDDSIDNKVLTRSDKNRGKSDNVPSEEVVKKMKNYWRQLLNAK
LITQRKFDNLTKAERGGLSELDKAGFIKRQLVETRQITKHVAQIL
DSRMNTKYDENDKLIREVKVITLKSKLVSDFRKDFQFYKVREINN
YHHAHDAYLNAVVGTALIKKYPKLESEFVYGDYKVYDVRKMIAKS
EQSGGSGGSGGSTNLSDIIEKETGKQLVIQESILMLPEEVEEVIG
NKPESDILVHTAYDESTDENVMLLTSDAPEYKPWALVIQDSNGEN
KIKMLSGGSGGSGGSTNLSDIIEKETGKQLVIQESILMLPEEVEE
VIGNKPESDILVHTAYDESTDENVMLLTSDAPEYKPWALVIQDSN
GENKIKMLSGGSKRTADGSEFEPKKKRKV
YE2-CP1028 base editor (YE2-BE4-CP1028)
(SEQ ID NO: 372)
MKRTADGSEFESPKKKRKVSSETGPVAVDPTLRRRIEPHEFEVFFD
PRELRKE
TCLLYEINWGGRHSIWRHTSQNTNKHVEVNFIEKFTTERYFCPNT
RCSITWFLSYSPCGECSRAITEFLSRYPHVTLFIYIARLYHHADP
RNRQGLEDLISSGVTIQIMTEQESGYCWRNFVNYSPSNEAHWPRY
PHLWVRLYVLELYCIILGLPPCLNILRRKQPQLTFFTIALQSCHY
QRLPPHILWATGLKSGGSSGGSSGSETPGTSESATPESSGGSSGG
SEIGKATAKYFFYSNIMNFFKTEITLANGEIRKRPLIETNGETGE
IVWDKGRDFATVRKVLSMPQVNIVKKTEVQTGGFSKESILPKRNS
DKLIARKKDWDPKKYGGFDSPTVAYSVLVVAKVEKGKSKKLKSVK
ELLGITIMERSSFEKNPIDFLEAKGYKEVKKDLIIKLPKYSLFEL
ENGRKRMLASAGELQKGNELALPSKYVNFLYLASHYEKLKGSPED
NEQKQLFVEQHKHYLDEIIEQISEFSKRVILADANLDKVLSAYNK
HRDKPIREQAENIIHLFTLTNLGAPAAFKYFDTTIDRKRYTSTKE
VLDATLIHQSITGLYETRIDLSQLGGDGGSGGSGGSGGSGGSGGS
GGMDKKYSIGLAIGTNSVGWAVITDEYKVPSKKFKVLGNTDRHSI
KKNLIGALLFDSGETAEATRLKRTARRRYTRRKNRICYLQEIFSN
EMAKVDDSFFHRLEESFLVEEDKKHERHPIFGNIVDEVAYHEKYP
TIYHLRKKLVDSTDKADLRLIYLALAHMIKFRGHFLIEGDLNPDN
SDVDKLFIQLVQTYNQLFEENPINASGVDAKAILSARLSKSRRLE
NLIAQLPGEKKNGLFGNLIALSLGLTPNFKSNFDLAEDAKLQLSK
DTYDDDLDNLLAQIGDQYADLFLAAKNLSDAILLSDILRVNTEIT
KAPLSASMIKRYDEHHQDLTLLKALVRQQLPEKYKEIFFDQSKNG
YAGYIDGGASQEEFYKFIKPILEKMDGTEELLVKLNREDLLRKQR
TFDNGSIPHQIHLGELHAILRRQEDFYPFLKDNREKIEKILTFRI
PYYVGPLARGNSRFAWMTRKSEETITPWNFEEVVDKGASAQSFIE
RMTNFDKNLPNEKVLPKHSLLYEYFTVYNELTKVKYVTEGMRKPA
FLSGEQKKAIVDLLFKTNRKVTVKQLKEDYFKKIECFDSVEISGV
EDRFNASLGTYHDLLKIIKDKDFLDNEENEDILEDIVLTLTLFED
REMIEERLKTYAHLFDDKVMKQLKRRRYTGWGRLSRKLINGIRDK
QSGKTILDFLKSDGFANRNFMQLIHDDSLTFKEDIQKAQVSGQGD
SLHEHIANLAGSPAIKKGILQTVKVVDELVKVMGRHKPENIVIEM
ARENQTTQKGQKNSRERMKRIEEGIKELGSQILKEHPVENTQLQN
EKLYLYYLQNGRDMYVDQELDINRLSDYDVDHIVPQSFLKDDSID
NKVLTRSDKNRGKSDNVPSEEVVKKMKNYWRQLLNAKLITQRKFD
NLTKAERGGLSELDKAGFIKRQLVETRQITKHVAQILDSRMNTKY
DENDKLIREVKVITLKSKLVSDFRKDFQFYKVREINNYHHAHDAY
LNAVVGTALIKKYPKLESEFVYGDYKVYDVRKMIAKSEQSGGSGG
SGGSTNLSDIIEKETGKQLVIQESILMLPEEVEEVIGNKPESDIL
VHTAYDESTDENVMLLTSDAPEYKPWALVIQDSNGENKIKMLSGG
SGGSGGSTNLSDIIEKETGKQLVIQESILMLPEEVEEVIGNKPES
DILVHTAYDESTDENVMLLTSDAPEYKPWALVIQDSNGENKIKML
SGGSKRTADGSEFEPKKKRKV
YEE-CP1028 base editor (YEE-BE4-CP1028)
(SEQ ID NO: 373)
MKRTADGSEFESPKKKRKVSSETGPVAVDPTLRRRIEPHEFEVFF
DPRELRKETCLLYEINWGGRHSIWRHTSQNTNKHVEVNFIEKFTT
ERYFCPNTRCSITWFLSYSPCGECSRAITEFLSRYPHVTLFIYIA
RLYHHADPENRQGLEDLISSGVTIQIMTEQESGYCWRNFVNYSPS
NEAHWPRYPHLWVRLYVLELYCIILGLPPCLNILRRKQPQLTFFT
IALQSCHYQRLPPHILWATGLKSGGSSGGSSGSETPGTSESATPE
SSGGSSGGSEIGKATAKYFFYSNIMNFFKTEITLANGEIRKRPLI
ETNGETGEIVWDKGRDFATVRKVLSMPQVNIVKKTEVQTGGFSKE
SILPKRNSDKLIARKKDWDPKKYGGFDSPTVAYSVLVVAKVEKGK
SKKLKSVKELLGITIMERSSFEKNPIDFLEAKGYKEVKKDLIIKL
PKYSLFELENGRKRMLASAGELQKGNELALPSKYVNFLYLASHYE
KLKGSPEDNEQKQLFVEQHKHYLDEIIEQISEFSKRVILADANLD
KVLSAYNKHRDKPIREQAENIIHLFTLTNLGAPAAFKYFDTTIDR
KRYTSTKEVLDATLIHQSITGLYETRIDLSQLGGDGGSGGSGGSG
GSGGSGGSGGMDKKYSIGLAIGTNSVGWAVITDEYKVPSKKFKVL
GNTDRHSIKKNLIGALLFDSGETAEATRLKRTARRRYTRRKNRIC
YLQEIFSNEMAKVDDSFFHRLEESFLVEEDKKHERHPIFGNIVDE
VAYHEKYPTIYHLRKKLVDSTDKADLRLIYLALAHMIKFRGHFLI
EGDLNPDNSDVDKLFIQLVQTYNQLFEENPINASGVDAKAILSAR
LSKSRRLENLIAQLPGEKKNGLFGNLIALSLGLTPNFKSNFDLAE
DAKLQLSKDTYDDDLDNLLAQIGDQYADLFLAAKNLSDAILLSDI
LRVNTEITKAPLSASMIKRYDEHHQDLTLLKALVRQQLPEKYKEI
FFDQSKNGYAGYIDGGASQEEFYKFIKPILEKMDGTEELLVKLNR
EDLLRKQRTFDNGSIPHQIHLGELHAILRRQEDFYPFLKDNREKI
EKILTFRIPYYVGPLARGNSRFAWMTRKSEETITPWNFEEVVDKG
ASAQSFIERMTNFDKNLPNEKVLPKHSLLYEYFTVYNELTKVKYV
TEGMRKPAFLSGEQKKAIVDLLFKTNRKVTVKQLKEDYFKKIECF
DSVEISGVEDRFNASLGTYHDLLKIIKDKDFLDNEENEDILEDIV
LTLTLFEDREMIEERLKTYAHLFDDKVMKQLKRRRYTGWGRLSRK
LINGIRDKQSGKTILDFLKSDGFANRNFMQLIHDDSLTFKEDIQK
AQVSGQGDSLHEHIANLAGSPAIKKGILQTVKVVDELVKVMGRHK
PENIVIEMARENQTTQKGQKNSRERMKRIEEGIKELGSQILKEHP
VENTQLQNEKLYLYYLQNGRDMYVDQELDINRLSDYDVDHIVPQS
FLKDDSIDNKVLTRSDKNRGKSDNVPSEEVVKKMKNYWRQLLNAK
LITQRKFDNLTKAERGGLSELDKAGFIKRQLVETRQITKHVAQIL
DSRMNTKYDENDKLIREVKVITLKSKLVSDFRKDFQFYKVREINN
YHHAHDAYLNAVVGTALIKKYPKLESEFVYGDYKVYDVRKMIAKS
EQSGGSGGSGGSTNLSDIIEKETGKQLVIQESILMLPEEVEEVIG
NKPESDILVHTAYDESTDENVMLLTSDAPEYKPWALVIQDSNGEN
KIKMLSGGSGGSGGSTNLSDIIEKETGKQLVIQESILMLPEEVEE
VIGNKPESDILVHTAYDESTDENVMLLTSDAPEYKPWALVIQDSN
GENKIKMLSGGSKRTADGSEFEPKKKRKV
EE-CP1028 base editor (EE-BE4-CP1028)
(SEQ ID NO: 374)
MKRTADGSEFESPKKKRKVSSETGPVAVDPTLRRRIEPHEFEVFF
DPRELRKETCLLYEINWGGRHSIWRHTSQNTNKHVEVNFIEKFTT
ERYFCPNTRCSITWFLSWSPCGECSRAITEFLSRYPHVTLFIYIA
RLYHHADPENRQGLEDLISSGVTIQIMTEQESGYCWRNFVNYSPS
NEAHWPRYPHLWVRLYVLELYCIILGLPPCLNILRRKQPQLTFFT
IALQSCHYQRLPPHILWATGLKSGGSSGGSSGSETPGTSESATPE
SSGGSSGGSEIGKATAKYFFYSNIMNFFKTEITLANGEIRKRPLI
ETNGETGEIVWDKGRDFATVRKVLSMPQVNIVKKTEVQTGGFSKE
SILPKRNSDKLIARKKDWDPKKYGGFDSPTVAYSVLVVAKVEKGK
SKKLKSVKELLGITIMERSSFEKNPIDFLEAKGYKEVKKDLIIKL
PKYSLFELENGRKRMLASAGELQKGNELALPSKYVNFLYLASHYE
KLKGSPEDNEQKQLFVEQHKHYLDEIIEQISEFSKRVILADANLD
KVLSAYNKHRDKPIREQAENIIHLFTLTNLGAPAAFKYFDTTIDR
KRYTSTKEVLDATLIHQSITGLYETRIDLSQLGGDGGSGGSGGSG
GSGGSGGSGGMDKKYSIGLAIGTNSVGWAVITDEYKVPSKKFKVL
GNTDRHSIKKNLIGALLFDSGETAEATRLKRTARRRYTRRKNRIC
YLQEIFSNEMAKVDDSFFHRLEESFLVEEDKKHERHPIFGNIVDE
VAYHEKYPTIYHLRKKLVDSTDKADLRLIYLALAHMIKFRGHFLI
EGDLNPDNSDVDKLFIQLVQTYNQLFEENPINASGVDAKAILSAR
LSKSRRLENLIAQLPGEKKNGLFGNLIALSLGLTPNFKSNFDLAE
DAKLQLSKDTYDDDLDNLLAQIGDQYADLFLAAKNLSDAILLSDI
LRVNTEITKAPLSASMIKRYDEHHQDLTLLKALVRQQLPEKYKEI
FFDQSKNGYAGYIDGGASQEEFYKFIKPILEKMDGTEELLVKLNR
EDLLRKQRTFDNGSIPHQIHLGELHAILRRQEDFYPFLKDNREKI
EKILTFRIPYYVGPLARGNSRFAWMTRKSEETITPWNFEEVVDKG
ASAQSFIERMTNFDKNLPNEKVLPKHSLLYEYFTVYNELTKVKYV
TEGMRKPAFLSGEQKKAIVDLLFKTNRKVTVKQLKEDYFKKIECF
DSVEISGVEDRFNASLGTYHDLLKIIKDKDFLDNEENEDILEDIV
LTLTLFEDREMIEERLKTYAHLFDDKVMKQLKRRRYTGWGRLSRK
LINGIRDKQSGKTILDFLKSDGFANRNFMQLIHDDSLTFKEDIQK
AQVSGQGDSLHEHIANLAGSPAIKKGILQTVKVVDELVKVMGRHK
PENIVIEMARENQTTQKGQKNSRERMKRIEEGIKELGSQILKEHP
VENTQLQNEKLYLYYLQNGRDMYVDQELDINRLSDYDVDHIVPQS
FLKDDSIDNKVLTRSDKNRGKSDNVPSEEVVKKMKNYWRQLLNAK
LITQRKFDNLTKAERGGLSELDKAGFIKRQLVETRQITKHVAQIL
DSRMNTKYDENDKLIREVKVITLKSKLVSDFRKDFQFYKVREINN
YHHAHDAYLNAVVGTALIKKYPKLESEFVYGDYKVYDVRKMIAKS
EQSGGSGGSGGSTNLSDIIEKETGKQLVIQESILMLPEEVEEVIG
NKPESDILVHTAYDESTDENVMLLTSDAPEYKPWALVIQDSNGEN
KIKMLSGGSGGSGGSTNLSDIIEKETGKQLVIQESILMLPEEVEE
VIGNKPESDILVHTAYDESTDENVMLLTSDAPEYKPWALVIQDSN
GENKIKMLSGGSKRTADGSEFEPKKKRKV
R33A + K34A-CP1028 base editor
(R33A + K34A-BE4-CP1028)
(SEQ ID NO: 375)
MKRTADGSEFESPKKKRKVSSETGPVAVDPTLRRRIEPHEFEVFF
DPRELAAETCLLYEINWGGRHSIWRHTSQNTNKHVEVNFIEKFTT
ERYFCPNTRCSITWFLSWSPCGECSRAITEFLSRYPHVTLFIYIA
RLYHHADPRNRQGLRDLISSGVTIQIMTEQESGYCWRNFVNYSPS
NEAHWPRYPHLWVRLYVLELYCIILGLPPCLNILRRKQPQLTFFT
IALQSCHYQRLPPHILWATGLKSGGSSGGSSGSETPGTSESATPE
SSGGSSGGSEIGKATAKYFFYSNIMNFFKTEITLANGEIRKRPLI
ETNGETGEIVWDKGRDFATVRKVLSMPQVNIVKKTEVQTGGFSKE
SILPKRNSDKLIARKKDWDPKKYGGFDSPTVAYSVLVVAKVEKGK
SKKLKSVKELLGITIMERSSFEKNPIDFLEAKGYKEVKKDLIIKL
PKYSLFELENGRKRMLASAGELQKGNELALPSKYVNFLYLASHYE
KLKGSPEDNEQKQLFVEQHKHYLDEIIEQISEFSKRVILADANLD
KVLSAYNKHRDKPIREQAENIIHLFTLTNLGAPAAFKYFDTTIDR
KRYTSTKEVLDATLIHQSITGLYETRIDLSQLGGDGGSGGSGGSG
GSGGSGGSGGMDKKYSIGLAIGTNSVGWAVITDEYKVPSKKFKVL
GNTDRHSIKKNLIGALLFDSGETAEATRLKRTARRRYTRRKNRIC
YLQEIFSNEMAKVDDSFFHRLEESFLVEEDKKHERHPIFGNIVDE
VAYHEKYPTIYHLRKKLVDSTDKADLRLIYLALAHMIKFRGHFLI
EGDLNPDNSDVDKLFIQLVQTYNQLFEENPINASGVDAKAILSAR
LSKSRRLENLIAQLPGEKKNGLFGNLIALSLGLTPNFKSNFDLAE
DAKLQLSKDTYDDDLDNLLAQIGDQYADLFLAAKNLSDAILLSDI
LRVNTEITKAPLSASMIKRYDEHHQDLTLLKALVRQQLPEKYKEI
FFDQSKNGYAGYIDGGASQEEFYKFIKPILEKMDGTEELLVKLNR
EDLLRKQRTFDNGSIPHQIHLGELHAILRRQEDFYPFLKDNREKI
EKILTFRIPYYVGPLARGNSRFAWMTRKSEETITPWNFEEVVDKG
ASAQSFIERMTNFDKNLPNEKVLPKHSLLYEYFTVYNELTKVKYV
TEGMRKPAFLSGEQKKAIVDLLFKTNRKVTVKQLKEDYFKKIECF
DSVEISGVEDRFNASLGTYHDLLKIIKDKDFLDNEENEDILEDIV
LTLTLFEDREMIEERLKTYAHLFDDKVMKQLKRRRYTGWGRLSRK
LINGIRDKQSGKTILDFLKSDGFANRNFMQLIHDDSLTFKEDIQK
AQVSGQGDSLHEHIANLAGSPAIKKGILQTVKVVDELVKVMGRHK
PENIVIEMARENQTTQKGQKNSRERMKRIEEGIKELGSQILKEHP
VENTQLQNEKLYLYYLQNGRDMYVDQELDINRLSDYDVDHIVPQS
FLKDDSIDNKVLTRSDKNRGKSDNVPSEEVVKKMKNYWRQLLNAK
LITQRKFDNLTKAERGGLSELDKAGFIKRQLVETRQITKHVAQIL
DSRMNTKYDENDKLIREVKVITLKSKLVSDFRKDFQFYKVREINN
YHHAHDAYLNAVVGTALIKKYPKLESEFVYGDYKVYDVRKMIAKS
EQSGGSGGSGGSTNLSDIIEKETGKQLVIQESILMLPEEVEEVIG
NKPESDILVHTAYDESTDENVMLLTSDAPEYKPWALVIQDSNGEN
KIKMLSGGSGGSGGSTNLSDIIEKETGKQLVIQESILMLPEEVEE
VIGNKPESDILVHTAYDESTDENVMLLTSDAPEYKPWALVIQDSN
GENKIKMLSGGSKRTADGSEFEPKKKRKV

[0417] These disclosed CBEs exhibit low off-target editing frequencies, and in particular low Cas9-independent off-target editing frequencies, while exhibiting high on-target editing efficiencies. For example, the YE1-BE4, YE1-CP1028, YE1-SpCas9-NG, R33A-BE4, and R33A+K34A-BE4-CP1028 base editors may exhibit off-target editing frequencies of less than 0.75% (e.g., about 0.4% or less) while maintaining on-target editing efficiencies of about 60% or more, in target sequences in mammalian cells. (See, e.g., FIGS. 11, 15A, 15B and 17.) The Examples of the present disclosure suggest that CBEs with cytidine deaminases that have a low intrinsic catalytic efficiency (k_{cat}/Kₘ) for cytosine-containing ssDNA substrates exhibit reduced Cas9-independent off-target deamination.

[0418] In some embodiments, the fusion protein comprises an amino acid sequence that is at least 60%, at least 65%, at least 70%, at least 75%, at least 80%, at least 85%, at least 90%, at least 95%, at least 96%, at least 97%, at least 98%, at least 99%, or at least 99.5% identical to any one of the amino acid sequences set forth in any one of SEQ ID NOs: 223-248, or to any of the fusion proteins provided herein. In some embodiments, the fusion protein comprises an amino acid sequence that has 1, 2, 3, 4, 5, 6, 7, 8, 9, 10, 11, 12, 13, 14, 15, 16, 17, 18, 19, 20, 21, 22, 21, 24, 25, 26, 27, 28, 29, 30, 31, 32, 33, 34, 35, 36, 37, 38, 39, 40, 41, 42, 43, 44, 45, 46, 47, 48, 49, 50, or more mutations compared to any one of the amino acid sequences set forth in SEQ ID NOs: 223-248, or any of the fusion proteins provided herein. In some embodiments, the fusion protein comprises an amino acid sequence that has at least 5, at least 10, at least 15, at least 20, at least 25, at least 30, at least 35, at least 40, at least 45, at least 50, at least 60, at least 70, at least 80, at least 90, at least 100, at least 110, at least 120, at least 130, at least 140, at least 150, at least 160, at least 170, at least 200, at least 300, at least 400, at least 500, at least 600, at least 700, at least 800, at least 900, at least 1000, at least 1100, at least 1200, at least 1300, at least 1400, at least 1500, at least 1600, at least 1700, at least 1750, or at least 1800 identical contiguous amino acid residues as compared to any one of the amino acid sequences set forth in SEQ ID NOs: 223-248, or any of the fusion proteins provided herein. In some embodiments, the fusion protein (base editor) comprises the amino acid sequence of SEQ ID NO: 223, or a variant thereof that is at least 60%, at least 65%, at least 70%, at least 75%, at least 80%, at least 85%, at least 90%, at least 95%, at least 96%, at least 97%, at least 98%, at least 99%, or at least 99.5% identical.

[0419] In some embodiments, the base editor fusion proteins provided herein are capable of modifying a specific nucleotide base without generating a significant proportion of indels. An “indel”, as used herein, refers to the insertion or deletion of a nucleotide base within a nucleic acid. Such insertions or deletions can lead to frame shift mutations within a coding region of a gene. In some embodiments, it is desirable to generate base editors that efficiently modify (e.g. mutate or deaminate) a specific nucleotide within a nucleic acid, without generating a large number of insertions or deletions (i.e., indels) in the nucleic acid. In certain embodiments, any of the base editors provided herein are capable of generating a greater proportion of intended modifications (e.g., point mutations or deaminations) versus indels. In some embodiments, the base editors provided herein are capable of generating a ratio of intended point mutations to indels that is greater than 1:1. In some embodiments, the base editors provided herein are capable of generating a ratio of intended point mutations to indels that is at least 1.5:1, at least 2:1, at least 2.5:1, at least 3:1, at least 3.5:1, at least 4:1, at least 4.5:1, at least 5:1, at least 5.5:1, at least 6:1, at least 6.5:1, at least 7:1, at least 7.5:1, at least 8:1, at least 10:1, at least 12:1, at least 15:1, at least 20:1, at least 25:1, at least 30:1, at least 40:1, at least 50:1, at least 100:1, at least 200:1, at least 300:1, at least 400:1, at least 500:1, at least 600:1, at least 700:1, at least 800:1, at least 900:1, or at least 1000:1, or more. The number of intended mutations and indels may be determined using any suitable method. In some embodiments, to calculate indel frequencies, sequencing reads are scanned for exact matches to two 10-bp sequences that flank both sides of a window in which indels might occur. If no exact matches are located, the read is excluded from analysis. If the length of this indel window exactly matches the reference sequence the read is classified as not containing an indel. If the indel window is two or more bases longer or shorter than the reference sequence, then the sequencing read is classified as an insertion or deletion, respectively.

[0420] In some embodiments, the base editors provided herein are capable of limiting formation of indels in a region of a nucleic acid. In some embodiments, the region is at a nucleotide targeted by a base editor or a region within 2, 3, 4, 5, 6, 7, 8, 9, or 10 nucleotides of a nucleotide targeted by a base editor. In some embodiments, any of the base editors provided herein are capable of limiting the formation of indels at a region of a nucleic acid to less than 1%, less than 1.5%, less than 2%, less than 2.5%, less than 3%, less than 3.5%, less than 4%, less than 4.5%, less than 5%, less than 6%, less than 7%, less than 8%, less than 9%, less than 10%, less than 12%, less than 15%, or less than 20%. The number of indels formed at a nucleic acid region may depend on the amount of time a nucleic acid (e.g., a nucleic acid within the genome of a cell) is exposed to a base editor. In some embodiments, an number or proportion of indels is determined after at least 1 hour, at least 2 hours, at least 6 hours, at least 12 hours, at least 24 hours, at least 36 hours, at least 48 hours, at least 3 days, at least 4 days, at least 5 days, at least 7 days, at least 10 days, or at least 14 days of exposing a nucleic acid (e.g., a nucleic acid within the genome of a cell) to a base editor.

[0421] Some aspects of the disclosure are based on the recognition that any of the base editors provided herein are capable of efficiently generating an intended mutation, such as a point mutation, in a nucleic acid (e.g. a nucleic acid within a genome of a subject) without generating a significant number of unintended mutations, such as unintended point mutations. In some embodiments, an intended mutation is a mutation that is generated by a specific base editor bound to a gRNA, specifically designed to generate the intended mutation. In some embodiments, the intended mutation is a mutation associated with a disease or disorder. In some embodiments, the intended mutation is an adenine (A) to guanine (G) point mutation associated with a disease or disorder. In some embodiments, the intended mutation is a thymine (T) to cytosine (C) point mutation associated with a disease or disorder. In some embodiments, the intended mutation is an adenine (A) to guanine (G) point mutation within the coding region of a gene. In some embodiments, the intended mutation is a thymine (T) to cytosine (C) point mutation within the coding region of a gene. In some embodiments, the intended mutation is a point mutation that generates a stop codon, for example, a premature stop codon within the coding region of a gene. In some embodiments, the intended mutation is a mutation that eliminates a stop codon. In some embodiments, the intended mutation is a mutation that alters the splicing of a gene. In some embodiments, the intended mutation is a mutation that alters the regulatory sequence of a gene (e.g., a gene promotor or gene repressor). In some embodiments, any of the base editors provided herein are capable of generating a ratio of intended mutations to unintended mutations (e.g., intended point mutations:unintended point mutations) that is greater than 1:1. In some embodiments, any of the base editors provided herein are capable of generating a ratio of intended mutations to unintended mutations (e.g., intended point mutations:unintended point mutations) that is at least 1.5:1, at least 2:1, at least 2.5:1, at least 3:1, at least 3.5:1, at least 4:1, at least 4.5:1, at least 5:1, at least 5.5:1, at least 6:1, at least 6.5:1, at least 7:1, at least 7.5:1, at least 8:1, at least 10:1, at least 12:1, at least 15:1, at least 20:1, at least 25:1, at least 30:1, at least 40:1, at least 50:1, at least 100:1, at least 150:1, at least 200:1, at least 250:1, at least 500:1, or at least 1000:1, or more.

Guide RNAs (gRNAs)

[0422] Some aspects of the invention relate to guide sequences (“guide RNA” or “gRNA”) that are capable of guiding a napDNAbp or a base editor comprising a napDNAbp to a target site in STAT3 (e.g., a Y705H, Y705F, and/or 5727 mutation in STAT3) for introducing one or more nucleotide changes that results in a genetic change and a corresponding change in the amino acid sequence of STAT3 to result in a STAT3 variant. In various embodiments, the change(s) introduced into STAT3 results in the inhibition and/or blocking of STAT3 phosphorylation, thereby forming a phosphorylation-deficient STAT3. In some embodiments, the STAT3 variant is a dominant negative mutant STAT3 the inhibits and/or blocks STAT3 signaling. In other embodiments, the STAT3 variant includes one or more amino acid changes that inhibit and/or block the phosphorylation of STAT3, and which sites may be the site of phosphorylation or may be a site that is not itself phosphorylated, but which affects a site of phosphorylation.

[0423] In various embodiments base editors (e.g., base editors provided herein) can be complexed, bound, or otherwise associated with (e.g., via any type of covalent or non-covalent bond) one or more guide sequences, i.e., the sequence which becomes associated or bound to the base editor and directs its localization to a specific target sequence having complementarity to the guide sequence or a portion thereof. The particular design aspects of a guide sequence will depend upon the nucleotide sequence of a genomic target site of interest (e.g., the Y705 or S727 residues of human STAT3) and the type of napDNA/RNAbp (e.g., type of Cas protein) present in the base editor, among other factors, such as PAM sequence locations, percent G/C content in the target sequence, the degree of microhomology regions, secondary structures, etc.

[0424] In general, a guide sequence is any polynucleotide sequence having sufficient complementarity with a target polynucleotide sequence to hybridize with the target sequence and direct sequence-specific binding of a napDNA/RNAbp (e.g., a Cas9, Cas9 homolog, or Cas9 variant) to the target sequence, such as a sequence within a STAT3 gene that comprises the Y705 or S727 residue. In some embodiments, the degree of complementarity between a guide sequence and its corresponding target sequence (e.g., STAT3), when optimally aligned using a suitable alignment algorithm, is about or more than about 50%, 60%, 75%, 80%, 85%, 90%, 95%, 97.5%, 99%, or more. Optimal alignment may be determined with the use of any suitable algorithm for aligning sequences, non-limiting example of which include the Smith-Waterman algorithm, the Needleman-Wunsch algorithm, algorithms based on the Burrows-Wheeler Transform (e.g. the Burrows Wheeler Aligner), ClustalW, Clustal X, BLAT, Novoalign (Novocraft Technologies, ELAND (Illumina, San Diego, Calif.), SOAP (available at soap.genomics.org.cn), and Maq (available at maq.sourceforge.net). In some embodiments, a guide sequence is about or more than about 5, 10, 11, 12, 13, 14, 15, 16, 17, 18, 19, 20, 21, 22, 23, 24, 25, 26, 27, 28, 29, 30, 31, 32, 33, 34, 35, 40, 45, 50, 75, or more nucleotides in length.

[0425] In some embodiments, a guide sequence is less than about 75, 50, 45, 40, 35, 30, 25, 20, 15, 12, or fewer nucleotides in length. The ability of a guide sequence to direct sequence-specific binding of a base editor to a target sequence may be assessed by any suitable assay. For example, the components of a base editor, including the guide sequence to be tested, may be provided to a host cell having the corresponding target sequence (e.g., a HGADFN 167 or HGADFN 188 cell line), such as by transfection with vectors encoding the components of a base editor disclosed herein, followed by an assessment of preferential cleavage within the target sequence, such as by Surveyor assay as described herein. Similarly, cleavage of a target polynucleotide sequence may be evaluated in a test tube by providing the target sequence, components of a base editor, including the guide sequence to be tested and a control guide sequence different from the test guide sequence, and comparing binding or rate of cleavage at the target sequence between the test and control guide sequence reactions. Other assays are possible, and will occur to those skilled in the art.

[0426] In some embodiments, a guide sequence designed to target the Y705 or S727 residue in STAT3. In some embodiments, the target sequence is a STAT3 sequence within a genome of a cell. An exemplary sequence within the human STAT3 gene that contains wild-type Y705 and S727 residues is provided below. It should be appreciated, however that additional exemplary STAT3 gene sequences are within the scope of this disclosure and guide RNAs can be designed to accommodate any differences between STAT3 sequences provided herein and any STAT3 sequences, or variants thereof (e.g., mutants), found in nature.

[0427] Portion of Homo sapiens signal transducer and activator transcription 3 (STAT3) gene (SEQ ID NO: 33), including the wild-type Y705 and S727 residues that, when one or both are mutated (substituted), the resulting STAT3 protein is not able to be phosphorylated. The wild-type Y705 and S727 residues are indicated in bold and underlined.

(SEQ ID NO: 33)
MAQWNQLQQLDTRYLEQLHQLYSDSFPMELRQFLAPWIESQDWAYAAS
KESHATLVFHNLLGEIDQQYSRFLQESNVLYQHNLRRIKQFLQSRYLE
KPMEIARIVARCLWEESRLLQTAATAAQQGGQANHPTAAVVTEKQQML
EQHLQDVRKRVQDLEQKMKVVENLQDDFDFNYKTLKSQGDMQDLNGNN
QSVTRQKMQQLEQMLTALDQMRRSIVSELAGLLSAMEYVQKTLTDEEL
ADWKRRQQIACIGGPPNICLDRLENWITSLAESQLQTRQQIKKLEELQ
QKVSYKGDPIVQHRPMLEERIVELFRNLMKSAFVVERQPCMPMHPDRP
LVIKTGVQFTTKVRLLVKFPELNYQLKIKVCIDKDSGDVAALRGSRKF
NILGTNTKVMNMEESNNGSLSAEFKHLTLREQRCGNGGRANCDASLIV
TEELHLITFETEVYHQGLKIDLETHSLPVVVISNICQMPNAWASILWY
NMLTNNPKNVNFFTKPPIGTWDQVAEVLSWQFSSTTKRGLSIEQLTTL
AEKLLGPGVNYSGCQITWAKFCKENMAGKGFSFWVWLDNIIDLVKKYI
LALWNEGYIMGFISKERERAILSTKPPGTFLLRFSESSKEGGVTFTWV
EKDISGKTQIQSVEPYTKQQLNNMSFAEIIMGYKIMDATNILVSPLVY
LYPDIPKEEAFGKYCRPESQEHPEADPGSAAPYLKTKFICVTPTTCSN
TIDLPMSPRTLDSLMQFGNNGEGAEPSAGGQFESLTFDMELTSECATS
PM

[0428] An exemplary portion of Homo sapiens STAT3 gene (SEQ ID NO: 33), where the Y705 residue has been changed to an F (phenylalanine) or an H (histidine), is provided below. The changed residue is indicated in bold and underlined.

(SEQ ID NO: 181)
MAQWNQLQQLDTRYLEQLHQLYSDSFPMELRQFLAPWIESQDWAYAAS
KESHATLVFHNLLGEIDQQYSRFLQESNVLYQHNLRRIKQFLQSRYLE
KPMEIARIVARCLWEESRLLQTAATAAQQGGQANHPTAAVVTEKQQML
EQHLQDVRKRVQDLEQKMKVVENLQDDFDFNYKTLKSQGDMQDLNGNN
QSVTRQKMQQLEQMLTALDQMRRSIVSELAGLLSAMEYVQKTLTDEEL
ADWKRRQQIACIGGPPNICLDRLENWITSLAESQLQTRQQIKKLEELQ
QKVSYKGDPIVQHRPMLEERIVELFRNLMKSAFVVERQPCMPMHPDRP
LVIKTGVQFTTKVRLLVKFPELNYQLKIKVCIDKDSGDVAALRGSRKF
NILGTNTKVMNMEESNNGSLSAEFKHLTLREQRCGNGGRANCDASLIV
TEELHLITFETEVYHQGLKIDLETHSLPVVVISNICQMPNAWASILWY
NMLTNNPKNVNFFTKPPIGTWDQVAEVLSWQFSSTTKRGLSIEQLTTL
AEKLLGPGVNYSGCQITWAKFCKENMAGKGFSFWVWLDNIIDLVKKYI
LALWNEGYIMGFISKERERAILSTKPPGTFLLRFSESSKEGGVTFTWV
EKDISGKTQIQSVEPYTKQQLNNMSFAEIIMGYKIMDATNILVSPLVY
LYPDIPKEEAFGKYCRPESQEHPEADPGSAAP(F/H)LKTKFICVTPT
TCSNTIDLPMSPRTLDSLMQFGNNGEGAEPSAGGQFESLTFDMELTSE
CATSPM

[0429] In some embodiments, the nucleic acid sequence of the STAT3 gene is as is shown in below in SEQ ID NO: 182. The underlined portion indicates the nucleic acid residues of mutant STAT3 that is complementary to the nucleic residues of the guide sequence

(SEQ ID NO: 14):
5′-UGCCCCAUACCUGAAGACCA-3′
(SEQ ID NO: 182)
5′-TTCTTCCCAGGCGCTGCCCCATACCTGAAGACCAAGTTT-3′.

[0430] In some embodiments, the nucleic acid sequence of the STAT3 gene is as is shown in below in SEQ ID NO: 182. The underlined portion indicates the nucleic acid residues of mutant STAT3 that is complementary to the nucleic residues of the guide sequence

(SEQ ID NO: 15):
5′-UUCAGGUAUGGGGCAGCGCC-3′
(SEQ ID NO: 182)
5′-TTCTTCCCAGGCGCTGCCCCATACCTGAAGACCAAGTTT-3′.

[0431] In some embodiments, the nucleic acid sequence of the STAT3 gene is as is shown in below in SEQ ID NO: 184. The underlined portion indicates the nucleic acid residues of mutant STAT3 that is complementary to the nucleic residues of the guide sequence

(SEQ ID NO: 16):
5′-CAGGUAUGGGGCAGCGCCUG-3′
(SEQ ID NO: 184)
5′-TTCTTCCCAGGCGCTGCCCCATACCTGAAGACCAAGTTT-3′.

[0432] Additional exemplary portions of the STAT3 gene include the following:

(SEQ ID NO: 185)
5′-TTCCCAGGCGCTGCCCCATA-3′
(SEQ ID NO: 186)
5′-TCCCAGGCGCTGCCCCATAG-3′
(SEQ ID NO: 187)
5′-CCCAGGCGCTGCCCCATAGA-3′
(SEQ ID NO: 188)
5′-CCAGGCGCTGCCCCATAGAA-3′
(SEQ ID NO: 189)
5′-CAGGCGCTGCCCCATAGAAC-3′
(SEQ ID NO: 190)
5′-AGGCGCTGCCCCATAGAACC-3′
(SEQ ID NO: 191)
5′-GGCGCTGCCCCATAGAACCA-3′
(SEQ ID NO: 192)
5′-GCGCTGCCCCATAGAACCAA-3′
(SEQ ID NO: 193)
5′-CGCTGCCCCATAGAACCAAG-3′
(SEQ ID NO: 194)
5′-GCTGCCCCATAGAACCAAGT-3′
(SEQ ID NO: 195)
5′-AGGCGCTGCCCCATACCTGAAG-3′
(SEQ ID NO: 196)
5′-CAGGCGCTGCCCCATACCTGAAGA-3′
(SEQ ID NO: 197)
5′-CCAGGCGCTGCCCCATACCTGAAGAA-3′
(SEQ ID NO: 198)
5′-CCCAGGCGCTGCCCCATACCTGAAGAAC-3′
(SEQ ID NO: 199)
5′-TCCCAGGCGCTGCCCCATACCTGAAGAACC-3′
(SEQ ID NO: 200)
5′-TTCCCAGGCGCTGCCCCATACCTGAAGAACCA-3′

[0433] The disclosure also contemplates exemplary portions of the STAT3 gene that are shorter or longer than any one of the exemplary portions of the STAT3 gene provided in any one of SEQ ID NOs: 185-200. It should be appreciated that guide sequences may be engineered that are complementary (e.g., 100% complementary) to any of the exemplary portions of the STAT3 gene provided herein (e.g., SEQ ID NOs: 182-200). In some embodiments, a guide sequence is complementary (e.g., 100% complementary) to any one of SEQ ID NOs: 182-200. In some embodiments, a guide sequence is complementary (e.g., 100% complementary) to a sequence of any one of SEQ ID NOs: 182-200 absent the first 1, 2, 3, 4, 5, 7, 8, 9, 10, 11, or 12 nucleic acid residues at the 5′ end. In some embodiments, a guide sequence is complementary (e.g., 100% complementary) to a sequence of any one of SEQ ID NOs: 182-200 absent the first 1, 2, 3, 4, 5, 7, 8, 9, 10, 11, or 12 nucleic acid residues at the 3′ end.

[0434] In some embodiments, a guide sequence is selected to reduce the degree of secondary structure within the guide sequence. Secondary structure may be determined by any suitable polynucleotide folding algorithm. Some programs are based on calculating the minimal Gibbs free energy. An example of one such algorithm is mFold, as described by Zuker and Stiegler (Nucleic Acids Res. 9 (1981), 133-148). Another example folding algorithm is the online webserver RNAfold, developed at Institute for Theoretical Chemistry at the University of Vienna, using the centroid structure prediction algorithm (see e.g. A. R. Gruber et al., 2008, Cell 106(1): 23-24; and PA Carr and GM Church, 2009, Nature Biotechnology 27(12): 1151-62). Further algorithms may be found in U.S. application Ser. No. 61/836,080; Broad Reference BI-2013/004A); incorporated herein by reference.

[0435] In general, a tracr mate sequence includes any sequence that has sufficient complementarity with a tracr sequence to promote one or more of: (1) excision of a guide sequence flanked by tracr mate sequences in a cell containing the corresponding tracr sequence; and (2) formation of a complex at a target sequence, wherein the complex comprises the tracr mate sequence hybridized to the tracr sequence. In general, degree of complementarity is with reference to the optimal alignment of the tracr mate sequence and tracr sequence, along the length of the shorter of the two sequences. Optimal alignment may be determined by any suitable alignment algorithm, and may further account for secondary structures, such as self-complementarity within either the tracr sequence or tracr mate sequence. In some embodiments, the degree of complementarity between the tracr sequence and tracr mate sequence along the length of the shorter of the two when optimally aligned is about or more than about 25%, 30%, 40%, 50%, 60%, 70%, 80%, 90%, 95%, 97.5%, 99%, or higher. In some embodiments, the tracr sequence is about or more than about 5, 6, 7, 8, 9, 10, 11, 12, 13, 14, 15, 16, 17, 18, 19, 20, 25, 30, 40, 50, or more nucleotides in length. In some embodiments, the tracr sequence and tracr mate sequence are contained within a single transcript, such that hybridization between the two produces a transcript having a secondary structure, such as a hairpin. Preferred loop forming sequences for use in hairpin structures are four nucleotides in length, and most preferably have the sequence GAAA. However, longer or shorter loop sequences may be used, as may alternative sequences. The sequences preferably include a nucleotide triplet (for example, AAA), and an additional nucleotide (for example C or G). Examples of loop forming sequences include CAAA and AAAG. In an embodiment of the invention, the transcript or transcribed polynucleotide sequence has at least two or more hairpins. In preferred embodiments, the transcript has two, three, four or five hairpins. In a further embodiment of the invention, the transcript has at most five hairpins. In some embodiments, the single transcript further includes a transcription termination sequence; preferably this is a polyT sequence, for example six T nucleotides. Further non-limiting examples of single polynucleotides comprising a guide sequence, a tracr mate sequence, and a tracr sequence are as follows (listed 5′ to 3′), where “N” represents a base of a guide sequence, the first block of lower case letters represent the tracr mate sequence, and the second block of lower case letters represent the tracr sequence, and the final poly-T sequence represents the transcription terminator:

(1)
(SEQ ID NO: 201)
NNNNNNNNgtttttgtactctcaagatttaGAAAtaaatcttgcagaagc
tacaaagataaggcttcatgccgaaatcaacaccctgtcattttatggca
gggtgttttcgttatttaaTTTTTT;
(2)
(SEQ ID NO: 202)
NNNNNNNNNNNNNNNNNNgtttttgtactctcaGAAAtgcagaagctaca
aagataaggcttcatgccgaaatcaacaccctgtcattttatggcagggt
gttttcgttatttaaTTTTTT;
(3)
(SEQ ID NO: 203)
NNNNNNNNNNNNNNNNNNNNgtttttgtactctcaGAAAtgcagaagcta
caaagataaggcttcatgccgaaatcaacaccctgtcattttatggcagg
gtgtTTTTT;
(4)
(SEQ ID NO: 204)
NNNNNNNNNNNNNNNNNNNNgttttagagctaGAAAtagcaagttaaaat
aaggctagtccgttatcaacttgaaaa agtggcaccgagtcggtgcTTT
TTT;
(5)
(SEQ ID NO: 205)
NNNNNNNNNNNNNNNNNNNNgttttagagctaGAAATAGcaagttaaaat
aaggctagtccgttatcaacttgaa aaagtgTTTTTTT;
and
(6)
(SEQ ID NO: 206)
NNNNNNNNNNNNNNNNNNNNgttttagagctagAAATAGcaagttaaaat
aaggctagtccgttatcaTTTTT TTT.

[0436] The disclosure also relates to guide RNA sequences that are variants of any of the herein disclosed guide RNA sequences or target sequences (including SEQ ID NOs.: 11-22 and 246-249), wherein the variants include guide RNA sequences or target sequences having a deletion of 1, 2, 3, 4, 5, 6, 7, 8, 9, 10, 11, 12, 13, 14, 15, 16, 17, 18, 19, 20, 21, 22, 23, 24, 25, 26, 27, 28, 29, or 30 nucleotides from any of the guide RNA or target sequence disclosed herein (e.g., SEQ ID NOs.: 11-22 and 246-249). In other embodiments, the variants also include guide RNA sequences or target sequences having at least 70%, 71%, 72%, 73%, 74%, 75%, 76%, 77%, 78%, 79%, 80%, 81%, 82%, 83%, 84%, 85%, 86%, 87%, 88%, 89%, 90%, 91%, 92%, 93%, 94%, 95%, 96%, 97%, 98%, 99%, or up to 99.9% sequence identity with a guide RNA or target sequence disclosed herein (e.g., SEQ ID NOs.: 11-22 and 246-249).

[0437] In some embodiments, sequences (1) to (3) are used in combination with Cas9 from S. thermophilus CRISPR. In some embodiments, sequences (4) to (6) are used in combination with Cas9 from S. pyogenes. In some embodiments, the tracr sequence is a separate transcript from a transcript comprising the tracr mate sequence.

[0438] It will be apparent to those of skill in the art that in order to target any of the fusion proteins comprising a Cas9 domain and an adenosine deaminase, as disclosed herein, to a target site, e.g., a site comprising a Y705 or S727 residue in STAT3 to be edited, it is typically necessary to co-express the fusion protein together with a guide RNA, e.g., an sgRNA. As explained in more detail elsewhere herein, a guide RNA typically comprises a tracrRNA framework allowing for Cas9 binding, and a guide sequence, which confers sequence specificity to the Cas9:nucleic acid editing enzyme/domain fusion protein.

[0439] In some embodiments, the guide RNA comprises a structure 5′-[guide sequence]-[Cas9-binding sequence]-3′, where the Cas9 binding sequence comprises a nucleic acid sequence that is at least 70%, 75%, 80%, 85%, 90%, 95%, 96%, 97%, 98%, 99%, or 99.5% identical to SEQ ID NO: 207 or 208, or SEQ ID NO: 207 or 208 absent the poly-U terminator sequence at the 3′ end. In some embodiments, the guide RNA comprises a structure 5′-[guide sequence]-[Cas9-binding sequence]-3′, where the Cas9 binding sequence comprises a nucleic acid sequence SEQ ID NO: 207, SEQ ID NO: 208, or SEQ ID NO: 207 or 208 absent the poly-U terminator sequence at the 3′ end.

(SEQ ID NO: 207)
5′-GUUUUAGAGCUAGAAAUAGCAAGUUAAAAUAAAGGCUAGUCCGUUAU
CAACUUGAAAAAGUGGCACCGAGUCGGUGCUUUUU-3′
(SEQ ID NO: 208)
5′-GUUUUAGAGCUAGAAAUAGCAAGUUAAAAUAAGGCUAGUCCGUUAUC
AACUUGAAAAAGUGGCACCGAGUCGGUGCUUUUUUU-3′

[0440] In some embodiments, the guide RNA comprises a nucleic acid sequence that is at least 70%, 75%, 80%, 85%, 90%, 95%, 96%, 97%, 98%, 99%, or 99.5% identical to SEQ ID NO: 209, or SEQ ID NO: 209 absent the poly-U terminator sequence at the 3′ end. In some embodiments, the guide RNA comprises the nucleic acid sequence SEQ ID NO: 209, or SEQ ID NO: 209 absent the poly-U terminator sequence at the 3′ end.

[0441] In some embodiments, the guide RNA comprises the nucleic acid sequence 5′-GGUCCACCCACCUGGGCUCCGUUUUAGAGCUAGAAAUAGCAAGUUAAAAUAA GGCUAGUCCGUUAUCAACUUGAAAAAGUGGCACCGAGUCGGUGCUUUUUUU-3′ (SEQ ID NO: 209).

[0442] The guide sequence is typically approximately 20 nucleotides long. Exemplary guide sequences for targeting a base editor (e.g., ABE(Q)) to a site comprising the Y705 or S727 residue in STAT3 are provided below. It should be appreciated, however, that changes to such guide sequences can be made based on the specific STAT3 sequence found within a cell, for example the cell of a patient having a cancer (e.g., glioblastoma, melanoma). Such suitable guide RNA sequences typically comprise guide sequences that are complementary to a nucleic sequence within 50 nucleotides upstream or downstream of the target nucleotide to be edited.

[0443] Exemplary guide sequences to target the Y705 residue in STAT3:

(SEQ ID NO: 210)
5′-AACCUGUUCAGGUAUGGGGCAGCGCC-3′;
(SEQ ID NO: 211)
5′-ACCUGUUCAGGUAUGGGGCAGCGCC-3′;
(SEQ ID NO: 212)
5′-CCUGUUCAGGUAUGGGGCAGCGCC-3′;
(SEQ ID NO: 213)
5′-CUGUUCAGGUAUGGGGCAGCGCC-3′;
(SEQ ID NO: 214)
5′-UGUUCAGGUAUGGGGCAGCGCC-3′;
(SEQ ID NO: 215)
5′-GUUCAGGUAUGGGGCAGCGCC-3′;
(SEQ ID NO: 216)
5′-UUCAGGUAUGGGGCAGCGCC-3′;
(SEQ ID NO: 217)
5′-UCAGGUAUGGGGCAGCGCC-3′;
(SEQ ID NO: 218)
5′-CAGGUAUGGGGCAGCGCC-3′;
(SEQ ID NO: 219)
5′-AGGUAUGGGGCAGCGCC-3′;
(SEQ ID NO: 220)
5′-GGUAUGGGGCAGCGCC-3′;
(SEQ ID NO: 221)
5′-CCUGUUCAGGUAUGGGGCAGCGCCUG-3′;
(SEQ ID NO: 222)
5′-CUGUUCAGGUAUGGGGCAGCGCCUG-3′;
(SEQ ID NO: 223)
5′-UGUUCAGGUAUGGGGCAGCGCCUG-3′;
(SEQ ID NO: 224)
5′-GUUCAGGUAUGGGGCAGCGCCUG-3′;
(SEQ ID NO: 225)
5′-UUCAGGUAUGGGGCAGCGCCUG-3′;
(SEQ ID NO: 226)
5′-UCAGGUAUGGGGCAGCGCCUG-3′;
(SEQ ID NO: 227)
5′-CAGGUAUGGGGCAGCGCCUG-3′;
(SEQ ID NO: 228)
5′-AGGUAUGGGGCAGCGCCUG-3′;
(SEQ ID NO: 229)
5′-GGUAUGGGGCAGCGCCUG-3′;
(SEQ ID NO: 230)
5′-CCUGGGUGCCCCAUACCUGAAGACCA-3′;
(SEQ ID NO: 231)
5′-CUGGGUUGCCCCAUACCUGAAGACCA-3′;
(SEQ ID NO: 232)
5′-UGGGUUGCCCCAUACCUGAAGACCA-3′;
(SEQ ID NO: 233)
5′-GGGUUGCCCCAUACCUGAAGACCA-3′;
(SEQ ID NO: 234)
5′-GGUUGCCCCAUACCUGAAGACCA-3′;
(SEQ ID NO: 235)
5′-GUUGCCCCAUACCUGAAGACCA-3′;
(SEQ ID NO: 236)
5′-UUGCCCCAUACCUGAAGACCA-3′;
(SEQ ID NO: 237)
5′-UGCCCCAUACCUGAAGACCA-3′;
(SEQ ID NO: 238)
5′-GCCCCAUACCUGAAGACCA-3′;
(SEQ ID NO: 239)
5′-CCCCAUACCUGAAGACCA-3′;
(SEQ ID NO: 240)
5′-CCCAUACCUGAAGACCA-3′;
or
(SEQ ID NO: 241)
5′-CCAUACCUGAAGACCA-3′.

[0444] Additional guide sequences to target the Y705 residue in STAT3 include:

(SEQ ID NO: 20)
5′-UGCCCCGUACCUGAAGACCA-3′
(SEQ ID NO: 21
5′-AGGUACGGGGCAGCACCUGC-3′
(SEQ ID NO: 22)
5′-UUCAGGUACGGGGCAGCACC-3′

[0445] For each of the exemplary guide sequences provided above (e.g., SEQ ID NOs: 210-241), the A that is complementary to the T of the TAC codon encoding tyrosine (Y705) in STAT3 is shown in bold.

[0446] The disclosure also provides guide sequences that are truncated variants of any of the guide sequences provided herein (e.g., SEQ ID NOs: 210-241). In some embodiments, the guide sequence comprises the amino acid sequence of any one of SEQ ID NOs: 210-241, absent the first 1, 2, 3, 4, 5, 6, 7, 8, 9, or 10 nucleic acid residues from the 5′ end. It should be appreciated that any of the 5′ truncated guide sequences provided herein may further comprise a G residue at the 5′ end. In some embodiments, the guide sequence comprises the amino acid sequence of any one of SEQ ID NOs: 210-241, absent the first 1, 2, 3, 4, 5, 6, 7, 8, 9, 10, 11, or 12 nucleic acid residues from the 3′ end.

[0447] The disclosure also provides guide sequences that are longer variants of any of the guide sequences provided herein (e.g., SEQ ID NOs: 210-241). In some embodiments, the guide sequence comprises one additional residue that is 5′-U-3′ at the 3′ end of any one of SEQ ID NOs: 210-241. In some embodiments, the guide sequence comprises two additional residues that are 5′-UG-3′ at the 3′ end of any one of SEQ ID NOs: 210-241. In some embodiments, the guide sequence comprises three additional residues that are 5′-UGG-3′ at the 3′ end of any one of SEQ ID NOs: 210-241. In some embodiments, the guide sequence comprises four additional residues that are 5′-UGGG-3′ at the 3′ end of any one of SEQ ID NOs: 210-241. In some embodiments, the guide sequence comprises five additional residues that are 5′-UGGGA-3′ at the 3′ end of any one of SEQ ID NOs: 210-241. In some embodiments, the guide sequence comprises six additional residues that are 5′-UGGGAA-3′ at the 3′ end of any one of SEQ ID NOs: 210-241. In some embodiments, the guide sequence comprises seven additional residues that are 5′-UGGGAAG-3′ at the 3′ end of any one of SEQ ID NOs: 210-241. In some embodiments, the guide sequence comprises eight additional residues that are 5′-UGGGAAGA-3′ at the 3′ end of any one of SEQ ID NOs: 210-241. In some embodiments, the guide sequence comprises nine additional residues that are 5′-UGGGAAGAA-3′ at the 3′ end of any one of SEQ ID NOs: 210-241.

[0448] In some embodiments, the guide RNAs for use in accordance with the disclosed methods of editing comprise synthetic single guide RNAs (sgRNAs) containing modified ribonucleotides. In some embodiments, the guide RNAs contain modifications such as 2′-O-methylated nucleotides and phosphorothioate linkages. In some embodiments, the guide RNAs contain 2′-O-methyl modifications in the first three and last three nucleotides, and phosphorothioate bonds between the first three and last three nucleotides. Exemplary modified synthetic sgRNAs are disclosed in Hendel A. et al., Nat. Biotechnol. 33, 985-989 (2015), herein incorporated by reference.

[0449] In some embodiments, the guide RNAs for use in accordance with the disclosed methods of editing comprise a backbone structure that is recognized by an S. pyogenes Cas9 protein or domain, such as an SpCas9 domain of the disclosed base editors. The backbone structure recognized by an SpCas9 protein may comprise the sequence 5′-[guide sequence]-guuuuagagcuagaaauagcaaguuaaaauaaggcuaguccguuaucaacuugaaaaaguggcaccgagucggugcuuu uu-3′ (SEQ ID NO: 63), wherein the guide sequence comprises a sequence that is complementary to the protospacer of the target sequence. See U.S. Publication No. 2015/0166981, published Jun. 18, 2015, the disclosure of which is incorporated by reference herein. The guide sequence is typically 20 or about 20 nucleotides long.

[0450] In other embodiments, the guide RNAs for use in accordance with the disclosed methods of editing comprise a backbone structure that is recognized by an S. aureus Cas9 protein. The backbone structure recognized by an SaCas9 protein may comprise the sequence 5′-[guide sequence]-guuuuaguacucuguaaugaaaauuacagaaucuacuaaaacaaggcaaaaugccguguuuaucucgucaacuuguugg cgagauuuuuuu-3′ (SEQ ID NO: 64).

[0451] In other embodiments, the guide RNAs for use in accordance with the disclosed methods of editing comprise a backbone structure that is recognized by an Lachnospiraceae bacterium Cas12a protein. The backbone structure recognized by an LbCas12a protein may comprise the sequence 5′-[guide sequence]-uaauuucuacuaaguguagau-3′ (SEQ ID NO: 65).

[0452] In other embodiments, the guide RNAs for use in accordance with the disclosed methods of editing comprise a backbone structure that is recognized by an Acidaminococcus sp. BV3L6 Cas12a protein. The backbone structure recognized by an AsCas12a protein may comprise the sequence 5′-[guide sequence]-uaauuucuacucuuguagau-3′ (SEQ ID NO: 66).

[0453] The sequences of suitable guide RNAs for targeting the disclosed ABEs to specific genomic target sites will be apparent to those of skill in the art based on the present disclosure. Such suitable guide RNA sequences typically comprise guide sequences that are complementary to a nucleic acid sequence within 50 nucleotides upstream or downstream of the target nucleobase pair to be edited. Some exemplary guide RNA sequences suitable for targeting any of the provided ABEs to specific target sequences are provided herein. Additional guide sequences are well known in the art and may be used with the base editors described herein. Additional exemplary guide sequences are disclosed in, for example, Jinek M., et al., Science 337:816-821 (2012); Mali P, Esvelt K M & Church G M (2013) Cas9 as a versatile tool for engineering biology, Nature Methods, 10, 957-963; Li J F et al., (2013) Multiplex and homologous recombination-mediated genome editing in Arabidopsis and Nicotiana benthamiana using guide RNA and Cas9, Nature Biotechnology, 31, 688-691; Hwang, W. Y. et al., Efficient genome editing in zebrafish using a CRISPR-Cas system, Nature Biotechnology 31, 227-229 (2013); Cong L et al., (2013) Multiplex genome engineering using CRIPSR/Cas systems, Science, 339, 819-823; Cho S W et al., (2013) Targeted genome engineering in human cells with the Cas9 RNA-guided endonuclease, Nature Biotechnology, 31, 230-232; Jinek, M. et al., RNA-programmed genome editing in human cells, eLife 2, e00471 (2013); Dicarlo, J. E. et al., Genome engineering in Saccharomyces cerevisiae using CRISPR-Cas systems. Nucleic Acid Res. (2013); Briner A E et al., (2014) Guide RNA functional modules direct Cas9 activity and orthogonality, Mol Cell, 56, 333-339, the entire contents of each of which are incorporated herein by reference.

[0454] Various methods can be used to design gRNAs for use in the methods of the present disclosure.

[0455] When designing a gRNA for any particular application or use, a number of considerations may be taken into account, which may include, but are not limited to:

(a) the target sequence, i.e., the nucleotide sequence in which one or more nucleobase modifications are desired to be installed by the base editor;
(b) the location of the cut site within the target sequence;
(c) the available PAM sequences (including the canonical SpCas9 PAM sites, as well as non-canonical PAM sites recognized by Cas9 variants and equivalents with expanded or differing PAM specificities);
(d) the spacing between the available PAM sequences and the location of the cut site in the target sequence;
(e) the particular Cas9, Cas9 variant, or Cas9 equivalent of the base editor being used;
(f) the sequence and length of the edit template; and
(g) the spacer sequence and length.

[0456] In one embodiment, an approach to designing a suitable gRNA is hereby provided. This embodiment provides a step-by-step set of instructions for designing gRNAs base editing that takes into account one or more of the above considerations.
[0457] 1. Define the target sequence and the edit. Retrieve the sequence of the target DNA region (˜200 bp) centered around the location of the desired edit (point mutation, insertion, deletion, or combination thereof).
[0458] 2. Locate target PAMs. Identify PAMs in the proximity to the desired edit location. PAMs can be identified on either strand of DNA proximal to the desired edit location. While PAMs close to the edit position are preferred (i.e., wherein the nick site is less than 30 nt from the edit position, or less than 29 nt, 28 nt, 27 nt, 26 nt, 25 nt, 24 nt, 23 nt, 22 nt, 21 nt, 20 nt, 19 nt, 18 nt, 17 nt, 16 nt, 15 nt, 14 nt, 13 nt, 12 nt, 11 nt, 10 nt, 9 nt, 8 nt, 7 nt, 6 nt, 5 nt, 4 nt, 3 nt, or 2 nt from the edit position to the nick site), it is possible to install edits using protospacers and PAMs that place the nick≥30 nt from the edit position.
[0459] 3. Locate the nick sites. For each PAM being considered, identify the corresponding nick site and on which strand. For Sp Cas9 H840A nickase, cleavage occurs in the PAM-containing strand between the 3^{rd} and 4^{th} bases 5′ to the NGG PAM. All edited nucleotides must exist 3′ of the nick site, so appropriate PAMs must place the nick 5′ to the target edit on the PAM-containing strand.
[0460] 4. Design the spacer sequence. The protospacer of Sp Cas9 corresponds to the 20 nucleotides 5′ to the NGG PAM on the PAM-containing strand. Efficient Pol III transcription initiation requires a G to be the first transcribed nucleotide. If the first nucleotide of the protospacer is a G, the spacer sequence for the PEgRNA is simply the protospacer sequence. If the first nucleotide of the protospacer is not a G, the spacer sequence of the PEgRNA is G followed by the protospacer sequence.
[0461] 5. Assemble the full gRNA sequence. Concatenate the gRNA components.

[0462] The above step-by-step process for designing a suitable gRNA is not meant to be limiting in any way. The disclosure contemplates variations of the above-described step-by-step process which would be derivable therefrom by a person of ordinary skill in the art.

[0463] The use of algorithms to design gRNAs is also contemplated by the present disclosure, including using the methods disclosed in Shen, et al. Nature (2018) 563, 646-651 (“inDelphi”) and Arbab et al. Cell (2020) 182(2) 463-480 (“BE-Hive”), which are herein incorporated by reference in their entireties.

### BE/gRNA Complexes

[0464] Some aspects of this disclosure provide complexes comprising any of the fusion proteins (e.g., base editors) provided herein, for example any of the adenosine base editors provided herein, and a guide nucleic acid bound to napDNAbp of the fusion protein. In some embodiments, the guide nucleic acid is any one of the guide RNAs provided herein. In some embodiments, the disclosure provides any of the fusion proteins (e.g., adenosine base editors) provided herein bound to any of the guide RNAs provided herein. In some embodiments, the napDNAbp of the fusion protein (e.g., adenosine base editor) is a Cas9 domain (e.g., a dCas9, a nuclease active Cas9, or a Cas9 nickase), which is bound to a guide RNA. In some embodiments, the complexes provided herein are configured to generate a mutation in a nucleic acid, for example to change an amino acid in a gene (e.g., STAT3) to change the properties of one or more proteins (e.g., STAT3).

[0465] In some embodiments, the guide RNA comprises a guide sequence that comprises at least 8, 9, 10, 11, 12, 13, 14, 15, 16, 17, 18, 19, 20, 21, 22, 23, 24, 25, 26, 27, 28, 29, or 30 contiguous nucleic acids that are 100% complementary to a target sequence, for example a target DNA sequence (e.g., a target DNA sequence of any one of SEQ ID NOs: 11-22 and 246-249). In some embodiments, the guide RNA comprises a guide sequence that comprises at least 8, 9, 10, 11, 12, 13, 14, 15, 16, 17, 18, 19, 20, 21, 22, 23, 24, 25, 26, 27, 28, 29, or 30 contiguous nucleic acids that are 100% complementary to a DNA sequence in a STAT3 gene (e.g., a target DNA sequence of any one of SEQ ID NOs: 11-22 and 246-249), for example a region of a human STAT3 gene. In some embodiments, the STAT3 is the STAT3 of Gene ID: 6674.

[0466] In some embodiments, any of the complexes provided herein comprise a gRNA having a guide sequence that comprises at least 8, 9, 10, 11, 12, 13, 14, 15, 16, 17, 18, 19, 20, 21, 22, 23, 24, 25, 26, 27, 28, 29, or 30 contiguous nucleic acids that are 100% complementary to any one of the nucleic acid sequences provided herein. It should be appreciated that the guide sequence of the gRNA may comprise one or more nucleotides that are not complementary to a target sequence. In some embodiments, the guide sequence of the gRNA is at the 5′ end of the gRNA. In some embodiments, the guide sequence of the gRNA further comprises a G at the 5′ end of the gRNA. In some embodiments, the G at the 5′ end of the gRNA is not complementary with the target sequence. In some embodiments, the guide sequence of the gRNA comprises 1, 2, 3, 4, 5, 6, 7, or 8 nucleotides that are not complementary to a target sequence. In some embodiments, the guide RNA comprises a guide sequence that comprises at least 8, 9, 10, 11, 12, 13, 14, 15, 16, 17, 18, 19, 20, 21, 22, 23, 24, 25, 26, 27, 28, 29, or 30 contiguous nucleic acids that are 100% complementary to a target sequence, for example a target DNA sequence in a STAT3 gene. In some embodiments, the guide RNA comprises a guide sequence that comprises at least 8, 9, 10, 11, 12, 13, 14, 15, 16, 17, 18, 19, 20, 21, 22, 23, 24, 25, 26, 27, 28, 29, or 30 contiguous nucleic acids that are 100% complementary to a DNA sequence in a human STAT3 gene. In some embodiments, the STAT3 gene is a human, chimpanzee, ape, monkey, dog, mouse, or rat STAT3 gene. In some embodiments, the STAT3 gene is a human STAT3 gene. In some embodiments, the STAT3 gene is the STAT3 gene of Gene ID: 6674, which may also be referred to as APRF, HIES, ADMIO, or ADMIO1.

### Editing Methods

[0467] Some aspects of this disclosure provide methods of using the fusion proteins, or complexes comprising a guide nucleic acid (e.g., gRNA) and a nucleobase editor provided herein to edit DNA, e.g., to edit STAT3. For example, the disclosure provided in certain embodiments methods of editing and/or modifying a STAT3 locus using a base editor described herein, such the encoded STAT3 product is a phosphorylation-deficient STAT3 variant having one or more amino acid substitutions in the STAT3 product that block, inhibit, or otherwise reduce phosphorylation of STAT3 at one or more sites of phosphorylation, including Tyr705 and Ser727 of the canonical STAT3 protein (SEQ ID NO: 33). In some embodiments, the one or more amino acid substitutions that block, inhibit, or otherwise reduce phosphorylation of STAT3 may comprise an amino acid substitution at one or more phosphorylation sites (e.g., a substitution at Tyr705 and/or Ser727), or alternately, the amino acid substitution may be at one or more residues that inhibit, reduce, or otherwise block phosphorylation of a phosphorylation site of STAT3, e.g., Tyr705 and/or Ser727 of STAT3, but which are sites that are not themselves phosphorylated. In other words, phosphorylation of STAT3 may be inhibited, reduced, or blocked by altering using the base editors disclosed herein one or more amino acids in STAT3—including actual phosphorylation sites, including Tyr705 and Ser727, or amino acid sites that are not themselves phosphorylated but which block, inhibit, or otherwise reduce phosphorylation of STAT3.

[0468] For example, some aspects of this disclosure provide methods comprising contacting a DNA, or RNA molecule with any of the fusion proteins provided herein, and with at least one guide nucleic acid (e.g., guide RNA), wherein the guide nucleic acid, (e.g., guide RNA) is comprises a sequence (e.g., a guide sequence that binds to a DNA target sequence) of at least 10 (e.g., at least 10, 15, 20, 25, or 30) contiguous nucleotides that is 100% complementary to a target sequence (e.g., any of the target STAT3 sequences provided herein). In some embodiments, the 3′ end of the target sequence is immediately adjacent to a canonical PAM sequence (NGG). In some embodiments, the 3′ end of the target sequence is not immediately adjacent to a canonical PAM sequence (NGG). In some embodiments, the 3′ end of the target sequence is immediately adjacent to an AGC, GAG, TTT, GTG, or CAA sequence.

[0469] Some aspects of the disclosure provide methods of using base editors (e.g., any of the fusion proteins provided herein) and gRNAs to change a residue (e.g., Y705F, Y705H, S727) in a STAT3 gene. In some embodiments, the disclosure provides methods of using base editors (e.g., any of the fusion proteins provided herein) and gRNAs to generate an A to G and/or T to C mutation in an STAT3 gene, thereby resulting in a STAT3 protein that cannot be phosphorylated (e.g., activated). Any of the nucleotides encoding Y705 or 5727 can be deaminated using a base editor (e.g., any of the adenosines and cytidine that make up the codons encoding Y705 and S727F). For example, one or more of the nucleotides T-A-C encoding Y705 may be deaminated. In some embodiments, one or more of the nucleotides T-C-C encoding S727 may be deaminated. In some embodiments, one nucleotide in the codons encoding Y705 and S727 is deaminated using the methods described herein. In certain embodiments, 2 or more nucleotides in the codons encoding Y705 and S727 are deaminated using the methods described herein. In some embodiments, the disclosure provides method for deaminating an adenosine nucleobase (A) in an STAT3 gene, the method comprising contacting the STAT3 gene with a base editor and a guide RNA bound to the base editor, where the guide RNA comprises a guide sequence that is complementary to a target nucleic acid sequence in the STAT3 gene. In some embodiments, the STAT3 gene comprises a C to T or G to A mutation. In some embodiments, the C to T or G to A mutation in the STAT3 gene impairs function of the STAT3 protein encoded by the STAT3 gene.

[0470] In some embodiments, deaminating an adenosine (A) nucleobase complementary to the T generates the C to T or G to A mutation in the STAT3 gene. In some embodiments, the C to T or G to A mutation in the STAT3 gene leads to a Tyr (Y) to His (H) or a Tyr (Y) to Phe (F) change in the STAT3 protein encoded by the STAT3 gene. In some embodiments, deaminating the adenosine nucleobase complementary to the T generates a Tyr to His or Tyr to Phe change in the STAT3 protein. The mutated STAT3 protein cannot be phosphorylated (e.g., activated).

[0471] In some embodiments, the guide sequence of the gRNA comprises at least 8, 9, 10, 11, 12, 13, 14, 15, 16, 17, 18, 19, 20, 21, 22, 23, 24, 25, 26, 27, 28, 29, 30, 31, 32, 33, 34, or 35 contiguous nucleic acids that are 100% complementary to a target nucleic acid sequence of the STAT3 gene. In some embodiments, the base editor nicks the target sequence that is complementary to the guide sequence.

[0472] In some embodiments, the target DNA sequence comprises a sequence associated with a STAT3 pathway disease or disorder, e.g., a cancer (glioblastoma, melanoma, etc.). In some embodiments, the target DNA sequence comprises a point mutation associated with a specific amino acid of STAT3. In some embodiments, the activity of the fusion protein (e.g., comprising an adenosine deaminase and a Cas9 domain), or the complex, results in a STAT3 protein that cannot be activated (e.g., cannot be phosphorylated). In some embodiments, the target DNA sequence encodes a protein, and the point mutation is in a codon and results in a change in the amino acid encoded by the mutant codon as compared to the wild-type codon. In some embodiments, the deamination of the mutant A results in a change of the amino acid encoded by the mutant codon (e.g., from tyrosine to histidine or from tyrosine to phenylalanine). In some embodiments, the deamination of the mutant A results in the codon encoding the mutant amino acid. In some embodiments, the contacting is in vivo in a subject. In some embodiments, the subject has or has been diagnosed with a cancer (e.g., melanoma or glioblastoma).

[0473] Some embodiments provide methods for using the DNA editing fusion proteins provided herein. In some embodiments, the fusion protein is used to introduce a point mutation into a nucleic acid by deaminating a target nucleobase, e.g., an A residue.

[0474] The instant disclosure provides methods for the treatment of a subject diagnosed with a disease associated with the STAT3 pathway that can be corrected by a DNA editing fusion protein provided herein. For example, in some embodiments, a method is provided that comprises administering to a subject having such a disease, e.g., a cancer (glioblastoma or melanoma).

[0475] In some embodiments, a fusion protein recognizes canonical PAMs and therefore can correct the pathogenic G to A or C to T mutations with canonical PAMs, e.g., NGG, respectively, in the flanking sequences. For example, Cas9 proteins that recognize canonical PAMs comprise an amino acid sequence that is at least 80%, 85%, 90%, 95%, 97%, 98%, or 99% identical to the amino acid sequence of Streptococcus pyogenes Cas9 as provided by any one of SEQ ID NOs: 74, 77, and 79, or to a fragment thereof comprising the RuvC and HNH domains of any one of SEQ ID NO: 74, 77, and 79.

[0476] It will be apparent to those of skill in the art that in order to target any of the fusion proteins comprising a Cas9 domain and an adenosine deaminase, as disclosed herein, to a target site, e.g., a site comprising a point mutation to be edited, it is typically necessary to co-express the fusion protein together with a guide RNA, e.g., an sgRNA. As explained in more detail elsewhere herein, a guide RNA typically comprises a tracrRNA framework allowing for Cas9 binding, and a guide sequence, which confers sequence specificity to the Cas9:nucleic acid editing enzyme/domain fusion protein. In some embodiments, the guide RNA comprises a structure 5′-[guide sequence]-GUUUUAGAGCUAGAAAUAGCAAGUUAAAAUAAAGGCUAGUCCGUUAUCAACU UGAAAAAGUGGCACCGAGUCGGUGCUUUUU-3′ (SEQ ID NO: 207); or 5′-[guide sequence]-GUUUUAGAGCUAGAAAUAGCAAGUUAAAAUAAGGCUAGUCCGUUAUCAACUU GAAAAAGUGGCACCGAGUCGGUGCUUUUUUU-3′ (SEQ ID NO: 208), wherein the guide sequence comprises a sequence that is complementary to the target sequence. In some embodiments, the guide sequence comprises a sequence selected from the group consisting of: 5′-TGCCCCA [symbol] ACCTGAAGACCA-3′ (SEQ ID NO: 11), 5′-TTCAGGTA [symbol] GGGGCAGCGCC-3′ (SEQ ID NO: 12), and 5′-CAGGTA [symbol] GGGGCAGCGCCTG-3′ (SEQ ID NO: 13), where the nucleotide target is indicated in bold underline. It should be appreciated that the T's indicated in the gRNA sequence are uracils (Us) in the RNA sequence. Accordingly, in some embodiments, the gRNA comprises a sequence selected from the group consisting of: 5′-UGCCCCA [symbol] ACCUGAAGACCA-3′ (SEQ ID NO: 14), 5′-UUCAGGUA [symbol] GGGGCAGCGCC-3′ (SEQ ID NO: 15), and 5′-CAGGUA [symbol] GGGGCAGCGCCUG-3′ (SEQ ID NO: 16).

[0477] In some embodiments, the gRNA comprises a sequence selected from the group consisting of: 5′-TGCCCCG [symbol] ACCTGAAGACCA-3′ (SEQ ID NO: 17), 5′-AGG [symbol] ACGGGGCAGCACCTGC-3′ (SEQ ID NO: 18), and 5′-TTCAGG [symbol] ACGGGGCAGCACC-3′ (SEQ ID NO: 19), where the nucleotide target is indicated in bold underline. It should be appreciated that the T's indicated in the gRNA sequence are uracils (Us) in the RNA sequence. Accordingly, in some embodiments, the gRNA comprises a sequence selected from the group consisting of: 5′-UGCCCCG [symbol] ACCUGAAGACCA-3′ (SEQ ID NO: 20), 5′-AGG [symbol] ACGGGGCAGCACCUGC-3′ (SEQ ID NO: 21), and 5′-UUCAGG [symbol] ACGGGGCAGCACC-3′ (SEQ ID NO: 22).

[0478] Some aspects of the disclosure provide methods for editing a nucleic acid. In some embodiments, the method is a method for editing a nucleobase of a nucleic acid (e.g., a base pair of a double-stranded DNA sequence). In some embodiments, the method comprises the steps of: a) contacting a target region of a nucleic acid (e.g., a double-stranded DNA sequence) with a complex comprising a base editor (e.g., a Cas9 domain fused to an adenosine deaminase) and a guide nucleic acid (e.g., gRNA), wherein the target region comprises a targeted nucleobase pair, b) inducing strand separation of said target region, c) converting a first nucleobase of said target nucleobase pair in a single strand of the target region to a second nucleobase, and d) cutting no more than one strand of said target region, where a third nucleobase complementary to the first nucleobase base is replaced by a fourth nucleobase complementary to the second nucleobase. In some embodiments, the method results in less than 20% indel formation in the nucleic acid. It should be appreciated that in some embodiments, step b is omitted. In some embodiments, the first nucleobase is an adenine. In some embodiments, the second nucleobase is a deaminated adenine, or inosine. In some embodiments, the third nucleobase is a thymine. In some embodiments, the fourth nucleobase is a cytosine. In some embodiments, the method results in less than 19%, 18%, 16%, 14%, 12%, 10%, 8%, 6%, 4%, 2%, 1%, 0.5%, 0.2%, or less than 0.1% indel formation. In some embodiments, the method further comprises replacing the second nucleobase with a fifth nucleobase that is complementary to the fourth nucleobase, thereby generating an intended edited base pair (e.g., A:T to G:C). In some embodiments, the fifth nucleobase is a guanine. In some embodiments, at least 5% of the intended base pairs are edited. In some embodiments, at least 10%, 15%, 20%, 25%, 30%, 35%, 40%, 45%, or 50% of the intended base pairs are edited.

[0479] In some embodiments, the ratio of intended products to unintended products in the target nucleotide is at least 2:1, 5:1, 10:1, 20:1, 30:1, 40:1, 50:1, 60:1, 70:1, 80:1, 90:1, 100:1, or 200:1, or more. In some embodiments, the ratio of intended point mutation to indel formation is greater than 1:1, 10:1, 50:1, 100:1, 500:1, or 1000:1, or more. In some embodiments, the cut single strand (nicked strand) is hybridized to the guide nucleic acid. In some embodiments, the cut single strand is opposite to the strand comprising the first nucleobase. In some embodiments, the base editor comprises a Cas9 domain. In some embodiments, the first base is adenine, and the second base is not a G, C, A, or T. In some embodiments, the second base is inosine. In some embodiments, the first base is adenine. In some embodiments, the second base is not a G, C, A, or T. In some embodiments, the second base is inosine. In some embodiments, the base editor inhibits base excision repair of the edited strand. In some embodiments, the base editor protects or binds the non-edited strand. In some embodiments, the base editor comprises UGI activity. In some embodiments, the base editor comprises a catalytically inactive inosine-specific nuclease. In some embodiments, the base editor comprises nickase activity. In some embodiments, the intended edited base pair is upstream of a PAM site. In some embodiments, the intended edited base pair is 1, 2, 3, 4, 5, 6, 7, 8, 9, 10, 11, 12, 13, 14, 15, 16, 17, 18, 19, or 20 nucleotides upstream of the PAM site. In some embodiments, the intended edited base pair is downstream of a PAM site. In some embodiments, the intended edited base pair is 1, 2, 3, 4, 5, 6, 7, 8, 9, 10, 11, 12, 13, 14, 15, 16, 17, 18, 19, or 20 nucleotides downstream stream of the PAM site. In some embodiments, the method does not require a canonical (e.g., NGG) PAM site. In some embodiments, the nucleobase editor comprises a linker. In some embodiments, the linker is 1-25 amino acids in length. In some embodiments, the linker is 5-20 amino acids in length. In some embodiments, linker is 10, 11, 12, 13, 14, 15, 16, 17, 18, 19, or 20 amino acids in length. In some embodiments, the target region comprises a target window, wherein the target window comprises the target nucleobase pair. In some embodiments, the target window comprises 1-10 nucleotides. In some embodiments, the target window is 1-9, 1-8, 1-7, 1-6, 1-5, 1-4, 1-3, 1-2, or 1 nucleotides in length. In some embodiments, the target window is 1, 2, 3, 4, 5, 6, 7, 8, 9, 10, 11, 12, 13, 14, 15, 16, 17, 18, 19, or 20 nucleotides in length. In some embodiments, the intended edited base pair is within the target window. In some embodiments, the target window comprises the intended edited base pair. In some embodiments, the method is performed using any of the base editors provided herein. In some embodiments, a target window is a deamination window.

[0480] In some embodiments, the disclosure provides methods for editing a nucleotide. In some embodiments, the disclosure provides a method for editing a nucleobase pair of a double-stranded DNA sequence. In some embodiments, the method comprises a) contacting a target region of the double-stranded DNA sequence with a complex comprising a base editor and a guide nucleic acid (e.g., gRNA), where the target region comprises a target nucleobase pair, b) inducing strand separation of said target region, c) converting a first nucleobase of said target nucleobase pair in a single strand of the target region to a second nucleobase, d) cutting no more than one strand of said target region, wherein a third nucleobase complementary to the first nucleobase base is replaced by a fourth nucleobase complementary to the second nucleobase, and the second nucleobase is replaced with a fifth nucleobase that is complementary to the fourth nucleobase, thereby generating an intended edited base pair, wherein the efficiency of generating the intended edited base pair is at least 5%. It should be appreciated that in some embodiments, step b is omitted. In some embodiments, at least 5% of the intended base pairs are edited. In some embodiments, at least 10%, 15%, 20%, 25%, 30%, 35%, 40%, 45%, or 50% of the intended base pairs are edited. In some embodiments, the method causes less than 19%, 18%, 16%, 14%, 12%, 10%, 8%, 6%, 4%, 2%, 1%, 0.5%, 0.2%, or less than 0.1% indel formation. In some embodiments, the ratio of intended product to unintended products at the target nucleotide is at least 2:1, 5:1, 10:1, 20:1, 30:1, 40:1, 50:1, 60:1, 70:1, 80:1, 90:1, 100:1, or 200:1, or more. In some embodiments, the ratio of intended point mutation to indel formation is greater than 1:1, 10:1, 50:1, 100:1, 500:1, or 1000:1, or more. In some embodiments, the cut single strand is hybridized to the guide nucleic acid. In some embodiments, the cut single strand is opposite to the strand comprising the first nucleobase. In some embodiments, the first base is adenine. In some embodiments, the second nucleobase is not G, C, A, or T. In some embodiments, the second base is inosine. In some embodiments, the base editor inhibits base excision repair of the edited strand. In some embodiments, the base editor protects (e.g., form base excision repair) or binds the non-edited strand. In some embodiments, the nucleobase editor comprises UGI activity. In some embodiments, the base editor comprises a catalytically inactive inosine-specific nuclease. In some embodiments, the nucleobase editor comprises nickase activity. In some embodiments, the intended edited base pair is upstream of a PAM site. In some embodiments, the intended edited base pair is 1, 2, 3, 4, 5, 6, 7, 8, 9, 10, 11, 12, 13, 14, 15, 16, 17, 18, 19, or 20 nucleotides upstream of the PAM site. In some embodiments, the intended edited base pair is downstream of a PAM site. In some embodiments, the intended edited base pair is 1, 2, 3, 4, 5, 6, 7, 8, 9, 10, 11, 12, 13, 14, 15, 16, 17, 18, 19, or 20 nucleotides downstream stream of the PAM site. In some embodiments, the method does not require a canonical (e.g., NGG) PAM site. In some embodiments, the nucleobase editor comprises a linker. In some embodiments, the linker is 1-25 amino acids in length. In some embodiments, the linker is 5-20 amino acids in length. In some embodiments, the linker is 10, 11, 12, 13, 14, 15, 16, 17, 18, 19, or 20 amino acids in length. In some embodiments, the target region comprises a target window, wherein the target window comprises the target nucleobase pair. In some embodiments, the target window comprises 1-10 nucleotides. In some embodiments, the target window is 1-9, 1-8, 1-7, 1-6, 1-5, 1-4, 1-3, 1-2, or 1 nucleotides in length. In some embodiments, the target window is 1, 2, 3, 4, 5, 6, 7, 8, 9, 10, 11, 12, 13, 14, 15, 16, 17, 18, 19, or 20 nucleotides in length. In some embodiments, the intended edited base pair occurs within the target window. In some embodiments, the target window comprises the intended edited base pair. In some embodiments, the nucleobase editor is any one of the base editors provided herein.

[0481] The instant disclosure provides methods for the treatment of a subject diagnosed with a disease associated with the STAT3 pathway that can be corrected by the editing system provided herein, e.g., a cancer (glioblastoma, melanoma, etc.). For example, in some embodiments, a method is provided that comprises administering to a subject having such a disease, e.g., cancer, an effective amount of the adenosine base editor and guide RNA described herein that changes the 705 and/or 727 amino acid of STAT3, such that the protein cannot be phosphorylated (i.e., cannot be activated).

### Base Editor Delivery

[0482] In another aspect, the present disclosure provides for the delivery of base editors in vitro and in vivo using various strategies, including on separate vectors using split inteins and as well as direct delivery strategies of the ribonucleoprotein complex (i.e., the base editor complexed to the gRNA and/or the second-site gRNA) using techniques such as electroporation, use of cationic lipid-mediated formulations, and induced endocytosis methods using receptor ligands fused to the ribonucleoprotein complexes. In addition, mRNA delivery methods may also be employed. Any such methods are contemplated herein.

[0483] In some aspects, the invention provides methods comprising delivering one or more base editor-encoding polynucleotides, such as or one or more vectors as described herein encoding one or more components of the base editing system described herein, one or more transcripts thereof, and/or one or proteins transcribed therefrom, to a host cell. In some aspects, the invention further provides cells produced by such methods, and organisms (such as animals, plants, or fungi) comprising or produced from such cells. In some embodiments, a base editor as described herein in combination with (and optionally complexed with) a guide sequence is delivered to a cell. Conventional viral and non-viral based gene transfer methods can be used to introduce nucleic acids in mammalian cells or target tissues. Such methods can be used to administer nucleic acids encoding components of a base editor to cells in culture, or in a host organism. Non-viral vector delivery systems include DNA plasmids, RNA (e.g. a transcript of a vector described herein), naked nucleic acid, and nucleic acid complexed with a delivery vehicle, such as a liposome. Viral vector delivery systems include DNA and RNA viruses, which have either episomal or integrated genomes after delivery to the cell. For a review of gene therapy procedures, see Anderson, Science 256:808-813 (1992); Nabel & Felgner, TIBTECH 11:211-217 (1993); Mitani & Caskey, TIBTECH 11:162-166 (1993); Dillon, TIBTECH 11:167-175 (1993); Miller, Nature 357:455-460 (1992); Van Brunt, Biotechnology 6(10):1149-1154 (1988); Vigne, Restorative Neurology and Neuroscience 8:35-36 (1995); Kremer & Perricaudet, British Medical Bulletin 51(1):31-44 (1995); Haddada et al., in Current Topics in Microbiology and Immunology Doerfler and Bihm (eds) (1995); and Yu et al., Gene Therapy 1:13-26 (1994).

[0484] Methods of non-viral delivery of nucleic acids include lipofection, nucleofection, microinjection, biolistics, virosomes, liposomes, immunoliposomes, polycation or lipid:nucleic acid conjugates, naked DNA, artificial virions, and agent-enhanced uptake of DNA. Lipofection is described in e.g., U.S. Pat. Nos. 5,049,386, 4,946,787; and 4,897,355) and lipofection reagents are sold commercially (e.g., Transfectam™ and Lipofectin™) Cationic and neutral lipids that are suitable for efficient receptor-recognition lipofection of polynucleotides include those of Feigner, WO 91/17424; WO 91/16024. Delivery can be to cells (e.g. in vitro or ex vivo administration) or target tissues (e.g. in vivo administration).

[0485] The preparation of lipid:nucleic acid complexes, including targeted liposomes such as immunolipid complexes, is well known to one of skill in the art (see, e.g., Crystal, Science 270:404-410 (1995); Blaese et al., Cancer Gene Ther. 2:291-297 (1995); Behr et al., Bioconjugate Chem. 5:382-389 (1994); Remy et al., Bioconjugate Chem. 5:647-654 (1994); Gao et al., Gene Therapy 2:710-722 (1995); Ahmad et al., Cancer Res. 52:4817-4820 (1992); U.S. Pat. Nos. 4,186,183, 4,217,344, 4,235,871, 4,261,975, 4,485,054, 4,501,728, 4,774,085, 4,837,028, and 4,946,787).

[0486] The use of RNA or DNA viral based systems for the delivery of nucleic acids take advantage of highly evolved processes for targeting a virus to specific cells in the body and trafficking the viral payload to the nucleus. Viral vectors can be administered directly to patients (in vivo) or they can be used to treat cells in vitro, and the modified cells may optionally be administered to patients (ex vivo). Conventional viral based systems could include retroviral, lentivirus, adenoviral, adeno-associated and herpes simplex virus vectors for gene transfer. Integration in the host genome is possible with the retrovirus, lentivirus, and adeno-associated virus gene transfer methods, often resulting in long term expression of the inserted transgene. Additionally, high transduction efficiencies have been observed in many different cell types and target tissues.

[0487] The tropism of a viruses can be altered by incorporating foreign envelope proteins, expanding the potential target population of target cells. Lentiviral vectors are retroviral vectors that are able to transduce or infect non-dividing cells and typically produce high viral titers. Selection of a retroviral gene transfer system would therefore depend on the target tissue. Retroviral vectors are comprised of cis-acting long terminal repeats with packaging capacity for up to 6-10 kb of foreign sequence. The minimum cis-acting LTRs are sufficient for replication and packaging of the vectors, which are then used to integrate the therapeutic gene into the target cell to provide permanent transgene expression. Widely used retroviral vectors include those based upon murine leukemia virus (MuLV), gibbon ape leukemia virus (GaLV), Simian Immuno deficiency virus (SIV), human immuno deficiency virus (HIV), and combinations thereof (see, e.g., Buchscher et al., J. Virol. 66:2731-2739 (1992); Johann et al., J. Virol. 66:1635-1640 (1992); Sommnerfelt et al., Virol. 176:58-59 (1990); Wilson et al., J. Virol. 63:2374-2378 (1989); Miller et al., J. Virol. 65:2220-2224 (1991); PCT/US94/05700). In applications where transient expression is preferred, adenoviral based systems may be used. Adenoviral based vectors are capable of very high transduction efficiency in many cell types and do not require cell division. With such vectors, high titer and levels of expression have been obtained. This vector can be produced in large quantities in a relatively simple system. Adeno-associated virus (“AAV”) vectors may also be used to transduce cells with target nucleic acids, e.g., in the in vitro production of nucleic acids and peptides, and for in vivo and ex vivo gene therapy procedures (see, e.g., West et al., Virology 160:38-47 (1987); U.S. Pat. No. 4,797,368; WO 93/24641; Kotin, Human Gene Therapy 5:793-801 (1994); Muzyczka, J. Clin. Invest. 94:1351 (1994). Construction of recombinant AAV vectors is described in a number of publications, including U.S. Pat. No. 5,173,414; Tratschin et al., Mol. Cell. Biol. 5:3251-3260 (1985); Tratschin, et al., Mol. Cell. Biol. 4:2072-2081 (1984); Hermonat & Muzyczka, PNAS 81:6466-6470 (1984); and Samulski et al., J. Virol. 63:03822-3828 (1989).

[0488] Packaging cells are typically used to form virus particles that are capable of infecting a host cell. Such cells include 293 cells, which package adenovirus, and ψ2 cells or PA317 cells, which package retrovirus. Viral vectors used in gene therapy are usually generated by producing a cell line that packages a nucleic acid vector into a viral particle. The vectors typically contain the minimal viral sequences required for packaging and subsequent integration into a host, other viral sequences being replaced by an expression cassette for the polynucleotide(s) to be expressed. The missing viral functions are typically supplied in trans by the packaging cell line. For example, AAV vectors used in gene therapy typically only possess ITR sequences from the AAV genome which are required for packaging and integration into the host genome. Viral DNA is packaged in a cell line, which contains a helper plasmid encoding the other AAV genes, namely rep and cap, but lacking ITR sequences. The cell line may also be infected with adenovirus as a helper. The helper virus promotes replication of the AAV vector and expression of AAV genes from the helper plasmid. The helper plasmid is not packaged in significant amounts due to a lack of ITR sequences. Contamination with adenovirus can be reduced by, e.g., heat treatment to which adenovirus is more sensitive than AAV. Additional methods for the delivery of nucleic acids to cells are known to those skilled in the art. See, for example, US20030087817, incorporated herein by reference.

[0489] In various embodiments, the base editor constructs (including, the split-constructs) may be engineered for delivery in one or more rAAV vectors. An rAAV as related to any of the methods and compositions provided herein may be of any serotype including any derivative or pseudotype (e.g., 1, 2, 3, 4, 5, 6, 7, 8, 9, 10, 11, 12, 13, 2/1, 2/5, 2/8, 2/9, 3/1, 3/5, 3/8, or 3/9). An rAAV may comprise a genetic load (i.e., a recombinant nucleic acid vector that expresses a gene of interest, such as a whole or split base editor fusion protein that is carried by the rAAV into a cell) that is to be delivered to a cell. An rAAV may be chimeric.

[0490] As used herein, the serotype of an rAAV refers to the serotype of the capsid proteins of the recombinant virus. Non-limiting examples of derivatives and pseudotypes include rAAV2/1, rAAV2/5, rAAV2/8, rAAV2/9, AAV2-AAV3 hybrid, AAVrh.10, AAVhu.14, AAV3a/3b, AAVrh32.33, AAV-HSC15, AAV-HSC17, AAVhu.37, AAVrh.8, CHt-P6, AAV2.5, AAV6.2, AAV2i8, AAV-HSC15/17, AAVM41, AAV9.45, AAV6(Y445F/Y731F), AAV2.5T, AAV-HAE1/2, AAV clone 32/83, AAVShH10, AAV2 (Y->F), AAV8 (Y733F), AAV2.15, AAV2.4, AAVM41, and AAVr3.45. A non-limiting example of derivatives and pseudotypes that have chimeric VP1 proteins is rAAV2/5-1VP1u, which has the genome of AAV2, capsid backbone of AAV5 and VP1u of AAV1. Other non-limiting example of derivatives and pseudotypes that have chimeric VP1 proteins are rAAV2/5-8VP1u, rAAV2/9-1VP1u, and rAAV2/9-8VP1u.

[0491] AAV derivatives/pseudotypes, and methods of producing such derivatives/pseudotypes are known in the art (see, e.g., Mol Ther. 2012 April; 20(4):699-708. doi: 10.1038/mt.2011.287. Epub 2012 Jan. 24. The AAV vector toolkit: poised at the clinical crossroads. Asokan A1, Schaffer D V, Samulski R J.). Methods for producing and using pseudotyped rAAV vectors are known in the art (see, e.g., Duan et al., J. Virol., 75:7662-7671, 2001; Halbert et al., J. Virol., 74:1524-1532, 2000; Zolotukhin et al., Methods, 28:158-167, 2002; and Auricchio et al., Hum. Molec. Genet., 10:3075-3081, 2001).

[0492] Methods of making or packaging rAAV particles are known in the art and reagents are commercially available (see, e.g., Zolotukhin et al. Production and purification of serotype 1, 2, and 5 recombinant adeno-associated viral vectors. Methods 28 (2002) 158-167; and U.S. Patent Publication Numbers US20070015238 and US20120322861, which are incorporated herein by reference; and plasmids and kits available from ATCC and Cell Biolabs, Inc.). For example, a plasmid comprising a gene of interest may be combined with one or more helper plasmids, e.g., that contain a rep gene (e.g., encoding Rep78, Rep68, Rep52 and Rep40) and a cap gene (encoding VP1, VP2, and VP3, including a modified VP2 region as described herein), and transfected into a recombinant cells such that the rAAV particle can be packaged and subsequently purified.

[0493] Recombinant AAV may comprise a nucleic acid vector, which may comprise at a minimum: (a) one or more heterologous nucleic acid regions comprising a sequence encoding a protein or polypeptide of interest or an RNA of interest (e.g., a siRNA or microRNA), and (b) one or more regions comprising inverted terminal repeat (ITR) sequences (e.g., wild-type ITR sequences or engineered ITR sequences) flanking the one or more nucleic acid regions (e.g., heterologous nucleic acid regions). Herein, heterologous nucleic acid regions comprising a sequence encoding a protein of interest or RNA of interest are referred to as genes of interest.

[0494] Any one of the rAAV particles provided herein may have capsid proteins that have amino acids of different serotypes outside of the VP1u region. In some embodiments, the serotype of the backbone of the VP1 protein is different from the serotype of the ITRs and/or the Rep gene. In some embodiments, the serotype of the backbone of the VP1 capsid protein of a particle is the same as the serotype of the ITRs. In some embodiments, the serotype of the backbone of the VP1 capsid protein of a particle is the same as the serotype of the Rep gene. In some embodiments, capsid proteins of rAAV particles comprise amino acid mutations that result in improved transduction efficiency.

[0495] In some embodiments, the nucleic acid vector comprises one or more regions comprising a sequence that facilitates expression of the nucleic acid (e.g., the heterologous nucleic acid), e.g., expression control sequences operatively linked to the nucleic acid. Numerous such sequences are known in the art. Non-limiting examples of expression control sequences include promoters, insulators, silencers, response elements, introns, enhancers, initiation sites, termination signals, and poly(A) tails. Any combination of such control sequences is contemplated herein (e.g., a promoter and an enhancer).

[0496] Final AAV constructs may incorporate a sequence encoding the gRNA. In other embodiments, the AAV constructs may incorporate a sequence encoding the second-site nicking guide RNA. In still other embodiments, the AAV constructs may incorporate a sequence encoding the second-site nicking guide RNA and a sequence encoding the gRNA.

[0497] In various embodiments, the gRNAs and the second-site nicking guide RNAs can be expressed from an appropriate promoter, such as a human U6 (hU6) promoter, a mouse U6 (mU6) promoter, or other appropriate promoter. The gRNAs and the second-site nicking guide RNAs can be driven by the same promoters or different promoters.

[0498] In some embodiments, a rAAV constructs or the herein compositions are administered to a subject enterally. In some embodiments, a rAAV constructs or the herein compositions are administered to the subject parenterally. In some embodiments, a rAAV particle or the herein compositions are administered to a subject subcutaneously, intraocularly, intravitreally, subretinally, intravenously (IV), intracerebro-ventricularly, intramuscularly, intrathecally (IT), intracisternally, intraperitoneally, via inhalation, topically, or by direct injection to one or more cells, tissues, or organs. In some embodiments, a rAAV particle or the herein compositions are administered to the subject by injection into the hepatic artery or portal vein.

[0499] In other aspects, the base editors can be divided at a split site and provided as two halves of a whole/complete base editor. The two halves can be delivered to cells (e.g., as expressed proteins or on separate expression vectors) and once in contact inside the cell, the two halves form the complete base editor through the self-splicing action of the inteins on each base editor half. Split intein sequences can be engineered into each of the halves of the encoded base editor to facilitate their transplicing inside the cell and the concomitant restoration of the complete, functioning base editor.

[0500] These split intein-based methods overcome several barriers to in vivo delivery. For example, the DNA encoding base editors is larger than the rAAV packaging limit, and so requires special solutions. One such solution is formulating the editor fused to split intein pairs that are packaged into two separate rAAV particles that, when co-delivered to a cell, reconstitute the functional editor protein. Several other special considerations to account for the unique features of base editing are described, including the optimization of second-site nicking targets and properly packaging base editors into virus vectors, including lentiviruses and rAAV.

[0501] In this aspect, the base editors can be divided at a split site and provided as two halves of a whole/complete base editor. The two halves can be delivered to cells (e.g., as expressed proteins or on separate expression vectors) and once in contact inside the cell, the two halves form the complete base editor through the self-splicing action of the inteins on each base editor half. Split intein sequences can be engineered into each of the halves of the encoded base editor to facilitate their transplicing inside the cell and the concomitant restoration of the complete, functioning base editor.

[0502] In various embodiments, the base editors may be engineered as two half proteins (i.e., a BE N-terminal half and a BE C-terminal half) by “splitting” the whole base editor as a “split site.” The “split site” refers to the location of insertion of split intein sequences (i.e., the N intein and the C intein) between two adjacent amino acid residues in the base editor. More specifically, the “split site” refers to the location of dividing the whole base editor into two separate halves, wherein in each halve is fused at the split site to either the N intein or the C intein motifs. The split site can be at any suitable location in the base editor fusion protein, but preferably the split site is located at a position that allows for the formation of two half proteins which are appropriately sized for delivery (e.g., by expression vector) and wherein the inteins, which are fused to each half protein at the split site termini, are available to sufficiently interact with one another when one half protein contacts the other half protein inside the cell.

[0503] In some embodiments, the split site is located in the napDNAbp domain. In other embodiments, the split site is located in the RT domain. In other embodiments, the split site is located in a linker that joins the napDNAbp domain and the RT domain.

[0504] In various embodiments, split site design requires finding sites to split and insert an N- and C-terminal intein that are both structurally permissive for purposes of packaging the two half base editor domains into two different AAV genomes. Additionally, intein residues necessary for trans splicing can be incorporated by mutating residues at the N terminus of the C terminal extein or inserting residues that will leave an intein “scar.”

[0505] In various embodiments, using SpCas9 nickase (SEQ ID NO: 74, 1368 amino acids) as an example, the split can be between any two amino acids between 1 and 1368. Preferred splits, however, will be located between the central region of the protein, e.g., from amino acids 50-1250, or from 100-1200, or from 150-1150, or from 200-1100, or from 250-1050, or from 300-1000, or from 350-950, or from 400-900, or from 450-850, or from 500-800, or from 550-750, or from 600-700 of SEQ ID NO: 74. In specific exemplary embodiments, the split site may be between 740/741, or 801/802, or 1010/1011, or 1041/1042. In other embodiments the split site may be between 1/2, 2/3, 3/4, 4/5, 5/6, 6/7, 7/8, 8/9, 9/10, 10/11, 12/13, 14/15, 15/16, 17/18, 19/20 . . . 50/51 . . . 100/101 . . . 200/201 . . . 300/301 . . . 400/401 . . . 500/501 . . . 600/601 . . . 700/701 . . . 800/801 . . . 900/901 . . . 1000/1001 . . . 1100/1101 . . . 1200/1201 . . . 1300/1301 . . . and 1367/1368, including all adjacent pairs of amino acid residues.

[0506] In various embodiments, the split intein sequences can be engineered by from the following intein sequences.

2-4 INTEIN:
(SEQ ID NO: 23)
CLAEGTRIFDPVTGTTHRIEDVVDGRKPIHVVAAAKDGTLLARPVVSWFDQG
TRDVIGLRIAGGAIVWATPDHKVLTEYGWRAAGELRKGDRVAGPGGSGNSLALSLT
ADQMVSALLDAEPPILYSEYDPTSPFSEASMMGLLTNLADRELVHMINWAKRVPGF
VDLTLHDQAHLLECAWLEILMIGLVWRSMEHPGKLLFAPNLLLDRNQGKCVEGMV
EIFDMLLATSSRFRMMNLQGEEFVCLKSIILLNSGVYTFLSSTLKSLEEKDHIHRALDK
ITDTLIHLMAKAGLTLQQQHQRLAQLLLILSHIRHMSNKGMEHLYSMKYKNVVPLY
DLLLEMLDAHRLHAGGSGASRVQAFADALDDKFLHDMLAEELRYSVIREVLPTRRA
RTFDLEVEELHTLVAEGVVVHNC
3-2 INTEIN
(SEQ ID NO: 24)
CLAEGTRIFDPVTGTTHRIEDVVDGRKPIHVVAVAKDGTLLARPVVSWFDQG
TRDVIGLRIAGGAIVWATPDHKVLTEYGWRAAGELRKGDRVAGPGGSGNSLALSLT
ADQMVSALLDAEPPILYSEYDPTSPFSEASMMGLLTNLADRELVHMINWAKRVPGF
VDLTLHDQAHLLECAWLEILMIGLVWRSMEHPGKLLFAPNLLLDRNQGKCVEGMV
EIFDMLLATSSRFRMMNLQGEEFVCLKSIILLNSGVYTFLSSTLKSLEEKDHIHRALDK
ITDTLIHLMAKAGLTLQQQHQRLAQLLLILSHIRHMSNKGMEHLYSMKYTNVVPLY
DLLLEMLDAHRLHAGGSGASRVQAFADALDDKFLHDMLAEELRYSVIREVLPTRRA
RTFDLEVEELHTLVAEGVVVHNC
30R3-1 INTEIN
(SEQ ID NO: 25)
CLAEGTRIFDPVTGTTHRIEDVVDGRKPIHVVAAAKDGTLLARPVVSWFDQG
TRDVIGLRIAGGATVWATPDHKVLTEYGWRAAGELRKGDRVAGPGGSGNSLALSLT
ADQMVSALLDAEPPIPYSEYDPTSPFSEASMMGLLTNLADRELVHMINWAKRVPGF
VDLTLHDQAHLLECAWLEILMIGLVWRSMEHPGKLLFAPNLLLDRNQGKCVEGMV
EIFDMLLATSSRFRMMNLQGEEFVCLKSIILLNSGVYTFLSSTLKSLEEKDHIHRALDK
ITDTLIHLMAKAGLTLQQQHQRLAQLLLILSHIRHMSNKGMEHLYSMKYKNVVPLY
DLLLEMLDAHRLHAGGSGASRVQAFADALDDKFLHDMLAEGLRYSVIREVLPTRRA
RTFDLEVEELHTLVAEGVVVHNC
30R3-2 INTEIN
(SEQ ID NO: 26)
CLAEGTRIFDPVTGTTHRIEDVVDGRKPIHVVAAAKDGTLLARPVVSWFDQG
TRDVIGLRIAGGATVWATPDHKVLTEYGWRAAGELRKGDRVAGPGGSGNSLALSLT
ADQMVSALLDAEPPILYSEYDPTSPFSEASMMGLLTNLADRELVHMINWAKRVPGF
VDLTLHDQAHLLECAWLEILMIGLVWRSMEHPGKLLFAPNLLLDRNQGKCVEGMV
EIFDMLLATSSRFRMMNLQGEEFVCLKSIILLNSGVYTFLSSTLKSLEEKDHIHRALDK
ITDTLIHLMAKAGLTLQQQHQRLAQLLLILSHIRHMSNKGMEHLYSMKYKNVVPLY
DLLLEMLDAHRLHAGGSGASRVQAFADALDDKFLHDMLAEELRYSVIREVLPTRRA
RTFDLEVEELHTLVAEGVVVHNC
30R3-3 INTEIN
(SEQ ID NO: 27)
CLAEGTRIFDPVTGTTHRIEDVVDGRKPIHVVAAAKDGTLLARPVVSWFDQG
TRDVIGLRIAGGATVWATPDHKVLTEYGWRAAGELRKGDRVAGPGGSGNSLALSLT
ADQMVSALLDAEPPIPYSEYDPTSPFSEASMMGLLTNLADRELVHMINWAKRVPGF
VDLTLHDQAHLLECAWLEILMIGLVWRSMEHPGKLLFAPNLLLDRNQGKCVEGMV
EIFDMLLATSSRFRMMNLQGEEFVCLKSIILLNSGVYTFLSSTLKSLEEKDHIHRALDK
ITDTLIHLMAKAGLTLQQQHQRLAQLLLILSHIRHMSNKGMEHLYSMKYKNVVPLY
DLLLEMLDAHRLHAGGSGASRVQAFADALDDKFLHDMLAEELRYSVIREVLPTRRA
RTFDLEVEELHTLVAEGVVVHNC
37R3-1 INTEIN
(SEQ ID NO: 28)
CLAEGTRIFDPVTGTTHRIEDVVDGRKPIHVVAAAKDGTLLARPVVSWFDQG
TRDVIGLRIAGGATVWATPDHKVLTEYGWRAAGELRKGDRVAGPGGSGNSLALSLT
ADQMVSALLDAEPPILYSEYNPTSPFSEASMMGLLTNLADRELVHMINWAKRVPGF
VDLTLHDQAHLLERAWLEILMIGLVWRSMEHPGKLLFAPNLLLDRNQGKCVEGMV
EIFDMLLATSSRFRMMNLQGEEFVCLKSIILLNSGVYTFLSSTLKSLEEKDHIHRALDK
ITDTLIHLMAKAGLTLQQQHQRLAQLLLILSHIRHMSNKGMEHLYSMKYKNVVPLY
DLLLEMLDAHRLHAGGSGASRVQAFADALDDKFLHDMLAEGLRYSVIREVLPTRRA
RTFDLEVEELHTLVAEGVVVHNC
37R3-2 INTEIN
(SEQ ID NO: 29)
CLAEGTRIFDPVTGTTHRIEDVVDGRKPIHVVAAAKDGTLLARPVVSWFDQG
TRDVIGLRIAGGAIVWATPDHKVLTEYGWRAAGELRKGDRVAGPGGSGNSLALSLT
ADQMVSALLDAEPPILYSEYDPTSPFSEASMMGLLTNLADRELVHMINWAKRVPGF
VDLTLHDQAHLLERAWLEILMIGLVWRSMEHPGKLLFAPNLLLDRNQGKCVEGMV
EIFDMLLATSSRFRMMNLQGEEFVCLKSIILLNSGVYTFLSSTLKSLEEKDHIHRALDK
ITDTLIHLMAKAGLTLQQQHQRLAQLLLILSHIRHMSNKGMEHLYSMKYKNVVPLY
DLLLEMLDAHRLHAGGSGASRVQAFADALDDKFLHDMLAEGLRYSVIREVLPTRRA
RTFDLEVEELHTLVAEGVVVHNC
37R3-3 INTEIN
(SEQ ID NO: 30)
CLAEGTRIFDPVTGTTHRIEDVVDGRKPIHVVAVAKDGTLLARPVVSWFDQG
TRDVIGLRIAGGATVWATPDHKVLTEYGWRAAGELRKGDRVAGPGGSGNSLALSLT
ADQMVSALLDAEPPILYSEYDPTSPFSEASMMGLLTNLADRELVHMINWAKRVPGF
VDLTLHDQAHLLERAWLEILMIGLVWRSMEHPGKLLFAPNLLLDRNQGKCVEGMV
EIFDMLLATSSRFRMMNLQGEEFVCLKSIILLNSGVYTFLSSTLKSLEEKDHIHRALDK
ITDTLIHLMAKAGLTLQQQHQRLAQLLLILSHIRHMSNKGMEHLYSMKYKNVVPLY
DLLLEMLDAHRLHAGGSGASRVQAFADALDDKFLHDMLAEELRYSVIREVLPTRRA
RTFDLEVEELHTLVAEGVVVHNC

[0507] In various embodiments, the split inteins can be used to separately deliver separate portions of a complete Base editor fusion protein to a cell, which upon expression in a cell, become reconstituted as a complete Base editor fusion protein through the trans splicing.

[0508] In some embodiments, the disclosure provides a method of delivering a Base editor fusion protein to a cell, comprising: constructing a first expression vector encoding an N-terminal fragment of the Base editor fusion protein fused to a first split intein sequence; constructing a second expression vector encoding a C-terminal fragment of the Base editor fusion protein fused to a second split intein sequence; delivering the first and second expression vectors to a cell, wherein the N-terminal and C-terminal fragment are reconstituted as the Base editor fusion protein in the cell as a result of trans splicing activity causing self-excision of the first and second split intein sequences.

[0509] In other embodiments, the split site is in the napDNAbp domain.

[0510] In still other embodiments, the split site is in the adenosine deaminase domain.

[0511] In yet other embodiments, the split site is in the linker.

[0512] In other embodiments, the base editors may be delivered by ribonucleoprotein complexes.

[0513] In this aspect, the base editors may be delivered by non-viral delivery strategies involving delivery of a base editor complexed with a gRNA (i.e., a BE ribonucleoprotein complex) by various methods, including electroporation and lipid nanoparticles. Methods of non-viral delivery of nucleic acids include lipofection, nucleofection, microinjection, biolistics, virosomes, liposomes, immunoliposomes, polycation or lipid:nucleic acid conjugates, naked DNA, artificial virions, and agent-enhanced uptake of DNA. Lipofection is described in e.g., U.S. Pat. Nos. 5,049,386, 4,946,787; and 4,897,355) and lipofection reagents are sold commercially (e.g., Transfectam™ and Lipofectin™). Cationic and neutral lipids that are suitable for efficient receptor-recognition lipofection of polynucleotides include those of Feigner, WO 91/17424; WO 91/16024. Delivery can be to cells (e.g. in vitro or ex vivo administration) or target tissues (e.g. in vivo administration).

[0514] The preparation of lipid:nucleic acid complexes, including targeted liposomes such as immunolipid complexes, is well known to one of skill in the art (see, e.g., Crystal, Science 270:404-410 (1995); Blaese et al., Cancer Gene Ther. 2:291-297 (1995); Behr et al., Bioconjugate Chem. 5:382-389 (1994); Remy et al., Bioconjugate Chem. 5:647-654 (1994); Gao et al., Gene Therapy 2:710-722 (1995); Ahmad et al., Cancer Res. 52:4817-4820 (1992); U.S. Pat. Nos. 4,186,183, 4,217,344, 4,235,871, 4,261,975, 4,485,054, 4,501,728, 4,774,085, 4,837,028, and 4,946,787).

### Pharmaceutical Compositions

[0515] Other aspects of the present disclosure relate to pharmaceutical compositions comprising any of the adenosine deaminases, fusion proteins, or the fusion protein-gRNA complexes described herein. The term “pharmaceutical composition”, as used herein, refers to a composition formulated for pharmaceutical use. In some embodiments, the pharmaceutical composition further comprises a pharmaceutically acceptable carrier. In some embodiments, the pharmaceutical composition comprises additional agents (e.g. for specific delivery, increasing half-life, or other therapeutic compounds).

[0516] As used here, the term “pharmaceutically-acceptable carrier” means a pharmaceutically-acceptable material, composition or vehicle, such as a liquid or solid filler, diluent, excipient, manufacturing aid (e.g., lubricant, talc magnesium, calcium or zinc stearate, or steric acid), or solvent encapsulating material, involved in carrying or transporting the compound from one site (e.g., the delivery site) of the body, to another site (e.g., organ, tissue or portion of the body). A pharmaceutically acceptable carrier is “acceptable” in the sense of being compatible with the other ingredients of the formulation and not injurious to the tissue of the subject (e.g., physiologically compatible, sterile, physiologic pH, etc.). Some examples of materials which can serve as pharmaceutically-acceptable carriers include: (1) sugars, such as lactose, glucose and sucrose; (2) starches, such as corn starch and potato starch; (3) cellulose, and its derivatives, such as sodium carboxymethyl cellulose, methylcellulose, ethyl cellulose, microcrystalline cellulose and cellulose acetate; (4) powdered tragacanth; (5) malt; (6) gelatin; (7) lubricating agents, such as magnesium stearate, sodium lauryl sulfate and talc; (8) excipients, such as cocoa butter and suppository waxes; (9) oils, such as peanut oil, cottonseed oil, safflower oil, sesame oil, olive oil, corn oil and soybean oil; (10) glycols, such as propylene glycol; (11) polyols, such as glycerin, sorbitol, mannitol and polyethylene glycol (PEG); (12) esters, such as ethyl oleate and ethyl laurate; (13) agar; (14) buffering agents, such as magnesium hydroxide and aluminum hydroxide; (15) alginic acid; (16) pyrogen-free water; (17) isotonic saline; (18) Ringer's solution; (19) ethyl alcohol; (20) pH buffered solutions; (21) polyesters, polycarbonates and/or polyanhydrides; (22) bulking agents, such as polypeptides and amino acids (23) serum component, such as serum albumin, HDL and LDL; (22) C2-C12 alcohols, such as ethanol; and (23) other non-toxic compatible substances employed in pharmaceutical formulations. Wetting agents, coloring agents, release agents, coating agents, sweetening agents, flavoring agents, perfuming agents, preservative and antioxidants can also be present in the formulation. The terms such as “excipient”, “carrier”, “pharmaceutically acceptable carrier” or the like are used interchangeably herein.

[0517] In some embodiments, the pharmaceutical composition is administered to a subject along with anti-cancer therapy as part of a combination therapy for treatment of cancer (e.g., melanoma, glioblastoma). Anti-cancer therapies are known in the art. For example, anti-cancer therapies include chemotherapy, surgery, radiation, immunotherapy, gene therapy, and so forth.

[0518] In some embodiments, the pharmaceutical compositions described herein can be combined with immunomodulatory treatments such as, e.g., inhibitors of a checkpoint molecule (e.g., PD-1, PD-L1, PD-L2, CTLA-4, LAGS, TIM-3, VISTA, TIGIT, CSF1R, CD112R (PVRIG), CD155 (PVR), B7-H2, B7-H4, BTLA, or A2aR). In some embodiments, the pharmaceutical compositions described herein are administered sequentially (in any order) or substantially simultaneously with an anti-PD-1 or anti-PD-L1 antibody, such as nivolumab, pembrolizumab, avelumab, durvalumab or atezolizumab. Additional examples of immunomodulatory therapies include activators that enhance the activity of stimulatory checkpoint such as CD122 (IL2) agonist, 4-1BB, ICOS ligand, GITR, and OX40. Further useful agents are also referenced in Physician's Desk Reference, 59.sup.th edition, (2005), Thomson P D R, Montvale N.J.; Gennaro et al., Eds. Remington's The Science and Practice of Pharmacy 20th edition, (2000), Lippincott Williams and Wilkins, Baltimore Md.; Braunwald et al., Eds. Harrison's Principles of Internal Medicine, 15.sup.th edition, (2001), McGraw Hill, N.Y.; Berkow et al., Eds. The Merck Manual of Diagnosis and Therapy, (1992), Merck Research Laboratories, Rahway N.J.

[0519] Alternatively or in addition, the treatment of the present disclosure can be combined with a chemotherapeutic agent, for example, pyrimidine analogs (5-fluorouracil, floxuridine, capecitabine, gemcitabine and cytarabine), purine analogs, folate antagonists and related inhibitors (mercaptopurine, thioguanine, pentostatin and 2-chlorodeoxyadenosine (cladribine)); antiproliferative/antimitotic agents including natural products such as vinca alkaloids (vinblastine, vincristine, and vinorelbine), microtubule disruptors such as taxane (paclitaxel, docetaxel), vincristin, vinblastin, nocodazole, epothilones and navelbine, epidipodophyllotoxins (etoposide, teniposide), DNA damaging agents (actinomycin, amsacrine, anthracyclines, bleomycin, busulfan, camptothecin, carboplatin, chlorambucil, cisplatin, cyclophosphamide, cytoxan, dactinomycin, daunorubicin, doxorubicin, epirubicin, hexamethyhnelamineoxaliplatin, iphosphamide, melphalan, merchlorehtamine, mitomycin, mitoxantrone, nitrosourea, plicamycin, procarbazine, taxol, taxotere, teniposide, triethylenethiophosphoramide and etoposide (VP16)); antibiotics such as dactinomycin (actinomycin D), daunorubicin, doxorubicin (adriamycin), idarubicin, anthracyclines, mitoxantrone, bleomycins, plicamycin (mithramycin) and mitomycin; enzymes (L-asparaginase which systemically metabolizes L-asparagine and deprives cells which do not have the capacity to synthesize their own asparagine); antiplatelet agents; antiproliferative/antimitotic alkylating agents such as nitrogen mustards (mechlorethamine, cyclophosphamide and analogs, melphalan, chlorambucil), ethylenimines and methylmelamines (hexamethylmelamine and thiotepa), alkyl sulfonates-busulfan, nitrosoureas (carmustine (BCNU) and analogs, streptozocin), trazenes-dacarbazinine (DTIC); antiproliferative/antimitotic antimetabolites such as folic acid analogs (methotrexate); platinum coordination complexes (cisplatin, carboplatin), procarbazine, hydroxyurea, mitotane, aminoglutethimide; hormones, hormone analogs (estrogen, tamoxifen, goserelin, bicalutamide, nilutamide) and aromatase inhibitors (letrozole, anastrozole); anticoagulants (heparin, synthetic heparin salts and other inhibitors of thrombin); fibrinolytic agents (such as tissue plasminogen activator, streptokinase and urokinase), aspirin, dipyridamole, ticlopidine, clopidogrel, abciximab; antimigratory agents; antisecretory agents (breveldin); immunosuppressives (cyclosporine, tacrolimus (FK-506), sirolimus (rapamycin), azathioprine, mycophenolate mofetil); anti-angiogenic compounds (e.g., TNP-470, genistein, bevacizumab) and growth factor inhibitors (e.g., fibroblast growth factor (FGF) inhibitors); angiotensin receptor blocker; nitric oxide donors; anti-sense oligonucleotides; antibodies (trastuzumab); cell cycle inhibitors and differentiation inducers (tretinoin); mTOR inhibitors, topoisomerase inhibitors (doxorubicin (adriamycin), amsacrine, camptothecin, daunorubicin, dactinomycin, eniposide, epirubicin, etoposide, idarubicin and mitoxantrone, topotecan, irinotecan), corticosteroids (cortisone, dexamethasone, hydrocortisone, methylpednisolone, prednisone, and prenisolone); growth factor signal transduction kinase inhibitors; mitochondrial dysfunction inducers and caspase activators; and chromatin disruptors.

[0520] The term “combination therapy” as used herein, encompasses administration of the pharmaceutical compositions and one or more other therapies in a sequential manner, that is, wherein each therapeutic agent is administered at a different time, as well as administration of the pharmaceutical compositions and one or more other therapies in a substantially simultaneous manner.

[0521] Sequential or substantially simultaneous administration of each agent (therapy) can be affected by any appropriate route including, but not limited to, oral routes, intravenous routes, intramuscular, subcutaneous routes, and direct absorption through mucous membrane tissues. The agents can be administered by the same route or by different routes. For example, a first agent can be administered orally, and a second agent can be administered intravenously.

[0522] As used herein, the term “sequential” means, unless otherwise specified, characterized by a regular sequence or order, e.g., if a dosage regimen includes the administration of a first therapeutic agent and a second therapeutic agent, a sequential dosage regimen could include administration of the first therapeutic agent before, simultaneously, substantially simultaneously, or after administration of the second therapeutic agent, but both agents will be administered in a regular sequence or order. The term “separate” means, unless otherwise specified, to keep apart one from the other. The term “simultaneously” means, unless otherwise specified, happening or done at the same time, i.e., the agents of the invention are administered at the same time. The term “substantially simultaneously” means that the agents are administered within minutes of each other (e.g., within 10 minutes of each other) and intends to embrace joint administration as well as consecutive administration, but if the administration is consecutive it is separated in time for only a short period (e.g., the time it would take a medical practitioner to administer two agents separately). As used herein, concurrent administration and substantially simultaneous administration are used interchangeably. Sequential administration refers to temporally separated administration of the agents described herein.

[0523] When co-administered with an additional therapeutic agent, suitable therapeutically effective dosages for each agent may be lowered due to the additive action or synergy. The efficacy of the methods described herein (e.g., administration of the pharmaceutical composition alone or as part of a combination therapy) may be assessed by any method known in the art and would be evident to a skilled medical professional. For example, the efficacy of the therapies described herein may be assessed by survival of the subject or cancer burden in the subject or tissue or sample thereof. In some embodiments, the therapy is assessed based on the safety or toxicity of the therapy in the subject, for example, by the overall health of the subject and/or the presence of adverse events or severe adverse events.

[0524] In some embodiments, the pharmaceutical composition is formulated for delivery to a subject, e.g., for gene editing. Suitable routes of administrating the pharmaceutical composition described herein include, without limitation: topical, subcutaneous, transdermal, intradermal, intralesional, intraarticular, intraperitoneal, intravesical, transmucosal, gingival, intradental, intracochlear, transtympanic, intraorgan, epidural, intrathecal, intramuscular, intravenous, intravascular, intraosseus, periocular, intratumoral, intracerebral, and intracerebroventricular administration. In one embodiment, the pharmaceutical composition is formulated for delivery to a subject via the intratumoral route.

[0525] In some embodiments, the pharmaceutical composition described herein is administered locally to a diseased site (e.g., tumor site). In some embodiments, the pharmaceutical composition described herein is administered to a subject by injection, by means of a catheter, by means of a suppository, or by means of an implant, the implant being of a porous, non-porous, or gelatinous material, including a membrane, such as a sialastic membrane, or a fiber.

[0526] In other embodiments, the pharmaceutical composition described herein is delivered in a controlled release system. In one embodiment, a pump may be used (see, e.g., Langer, 1990, Science 249:1527-1533; Sefton, 1989, CRC Crit. Ref. Biomed. Eng. 14:201; Buchwald et al., 1980, Surgery 88:507; Saudek et al., 1989, N. Engl. J. Med. 321:574). In another embodiment, polymeric materials can be used. (See, e.g., Medical Applications of Controlled Release (Langer and Wise eds., CRC Press, Boca Raton, Fla., 1974); Controlled Drug Bioavailability, Drug Product Design and Performance (Smolen and Ball eds., Wiley, New York, 1984); Ranger and Peppas, 1983, Macromol. Sci. Rev. Macromol. Chem. 23:61. See also Levy et al., 1985, Science 228:190; During et al., 1989, Ann. Neurol. 25:351; Howard et al., 1989, J. Neurosurg. 71:105). Other controlled release systems are discussed, for example, in Langer, supra.

[0527] In some embodiments, the pharmaceutical composition is formulated in accordance with routine procedures as a composition adapted for intravenous or subcutaneous administration to a subject, e.g., a human. In some embodiments, pharmaceutical compositions for administration by injection are solutions in sterile isotonic aqueous buffer. Where necessary, the pharmaceutical can also include a solubilizing agent and a local anesthetic such as lignocaine to ease pain at the site of the injection. Generally, the ingredients are supplied either separately or mixed together in unit dosage form, for example, as a dry lyophilized powder or water free concentrate in a hermetically sealed container such as an ampoule or sachette indicating the quantity of active agent. Where the pharmaceutical is to be administered by infusion, it can be dispensed with an infusion bottle containing sterile pharmaceutical grade water or saline. Where the pharmaceutical composition is administered by injection, an ampoule of sterile water for injection or saline can be provided so that the ingredients can be mixed prior to administration.

[0528] A pharmaceutical composition for systemic administration may be a liquid, e.g., sterile saline, lactated Ringer's or Hank's solution. In addition, the pharmaceutical composition can be in solid forms and re-dissolved or suspended immediately prior to use. Lyophilized forms are also contemplated.

[0529] The pharmaceutical composition can be contained within a lipid particle or vesicle, such as a liposome or microcrystal, which is also suitable for parenteral administration. The particles can be of any suitable structure, such as unilamellar or plurilamellar, so long as compositions are contained therein. Compounds can be entrapped in “stabilized plasmid-lipid particles” (SPLP) containing the fusogenic lipid dioleoylphosphatidylethanolamine (DOPE), low levels (5-10 mol %) of cationic lipid, and stabilized by a polyethyleneglycol (PEG) coating (Zhang Y. P. et al., Gene Ther. 1999, 6:1438-47). Positively charged lipids such as N-[1-(2,3-dioleoyloxi)propyl]-N,N,N-trimethyl-amoniummethylsulfate, or “DOTAP,” are particularly preferred for such particles and vesicles. The preparation of such lipid particles is well known. See, e.g., U.S. Pat. Nos. 4,880,635; 4,906,477; 4,911,928; 4,917,951; 4,920,016; and 4,921,757; each of which is incorporated herein by reference.

[0530] The pharmaceutical composition described herein may be administered or packaged as a unit dose, for example. The term “unit dose” when used in reference to a pharmaceutical composition of the present disclosure refers to physically discrete units suitable as unitary dosage for the subject, each unit containing a predetermined quantity of active material calculated to produce the desired therapeutic effect in association with the required diluent; i.e., carrier, or vehicle.

[0531] Further, the pharmaceutical composition can be provided as a pharmaceutical kit comprising (a) a container containing a compound of the invention in lyophilized form and (b) a second container containing a pharmaceutically acceptable diluent (e.g., sterile water) for injection. Optionally, the kit may comprise a further therapy, for example, (c) a contain containing an immune checkpoint inhibitor (e.g., anti-PD-1 antibody). The pharmaceutically acceptable diluent can be used for reconstitution or dilution of the lyophilized compound of the invention. Optionally associated with such container(s) can be a notice in the form prescribed by a governmental agency regulating the manufacture, use or sale of pharmaceuticals or biological products, which notice reflects approval by the agency of manufacture, use or sale for human administration.

[0532] In another aspect, an article of manufacture containing materials useful for the treatment of the diseases described above is included. In some embodiments, the article of manufacture comprises a container and a label. Suitable containers include, for example, bottles, vials, syringes, and test tubes. The containers may be formed from a variety of materials such as glass or plastic. In some embodiments, the container holds a composition that is effective for treating a disease described herein and may have a sterile access port. For example, the container may be an intravenous solution bag or a vial having a stopper pierceable by a hypodermic injection needle. The active agent in the composition is a compound of the invention. In some embodiments, the label on or associated with the container indicates that the composition is used for treating the disease of choice. The article of manufacture may further comprise a second container comprising a pharmaceutically-acceptable buffer, such as phosphate-buffered saline, Ringer's solution, or dextrose solution. It may further include other materials desirable from a commercial and user standpoint, including other buffers, diluents, filters, needles, syringes, and package inserts with instructions for use.

### Kits, Vectors, Cells

[0533] Some aspects of this disclosure provide kits comprising a nucleic acid construct comprising a nucleotide sequence encoding a base editor, or a component thereof, including a cytidine deaminase, adenosine deaminase, or an napDNAbp, and/or a guide RNA, for editing a target DNA (e.g., a STAT3 locus) in a cell. In some embodiments, the nucleotide sequence encodes any of the napDNAbps, cytidine deaminases, and/or adenosine deaminases, and/or guide RNAs provided herein. In some embodiments, the nucleotide sequence comprises a heterologous promoter that drives expression of the napDNAbps, cytidine deaminases, and/or adenosine deaminases, and/or guide RNAs described herein. The nucleotide sequence may further comprise one or more heterologous promoters that drive expression of the napDNAbps, cytidine deaminases, and/or adenosine deaminases, and/or guide RNAs, either from the same nucleotide sequence or separate nucleotide sequences.

[0534] In some embodiments, the kit further comprises an expression construct encoding a guide nucleic acid backbone, e.g., a guide RNA backbone, wherein the construct comprises a cloning site positioned to allow the cloning of a nucleic acid sequence identical or complementary to a target sequence into the guide nucleic acid, e.g., guide RNA backbone.

[0535] The disclosure further provides kits comprising a nucleic acid construct, comprising (a) a nucleotide sequence encoding a napDNAbp (e.g., a Cas9 domain) fused to a deaminase, or a base editor comprising a napDNAbp (e.g., Cas9 domain) and a deaminase as provided herein; and (b) a heterologous promoter that drives expression of the sequence of (a). In some embodiments, the kit further comprises an expression construct encoding a guide nucleic acid backbone, (e.g., a guide RNA backbone), wherein the construct comprises a cloning site positioned to allow the cloning of a nucleic acid sequence identical or complementary to a target sequence into the guide nucleic acid (e.g., guide RNA backbone).

[0536] Some embodiments of this disclosure provide cells comprising any of the base editors or complexes provided herein. In some embodiments, the cells comprise nucleotide constructs that encode any of the base editors provided herein. In some embodiments, the cells comprise any of the nucleotides or vectors provided herein. In some embodiments, a host cell is transiently or non-transiently transfected with one or more vectors described herein. In some embodiments, a cell is transfected as it naturally occurs in a subject. In some embodiments, a cell that is transfected is taken from a subject. In some embodiments, the cell is derived from cells taken from a subject, such as a cell line. A wide variety of cell lines for tissue culture are known in the art.

[0537] In some embodiments, a host cell is transiently or non-transiently transfected with one or more vectors described herein. In some embodiments, a cell is transfected as it naturally occurs in a subject. In some embodiments, a cell that is transfected is taken from a subject. In some embodiments, the cell is derived from cells taken from a subject, such as a cell line. A wide variety of cell lines for tissue culture are known in the art. Examples of cell lines include, but are not limited to, C8161, CCRF-CEM, MOLT, mIMCD-3, NHDF, HeLa-S3, Huh1, Huh4, Huh7, HUVEC, HASMC, HEKn, HEKa, MiaPaCell, Panc1, PC-3, TF1, CTLL-2, C1R, Rat6, CV1, RPTE, A10, T24, J82, A375, ARH-77, Calu1, SW480, SW620, SKOV3, SK-UT, CaCo2, P388D1, SEM-K2, WEHI-231, HB56, TIB55, Jurkat, J45.01, LRMB, Bcl-1, BC-3, IC21, DLD2, Raw264.7, NRK, NRK-52E, MRCS, MEF, Hep G2, HeLa B, HeLa T4, COS, COS-1, COS-6, COS-M6A, BS-C-1 monkey kidney epithelial, BALB/3T3 mouse embryo fibroblast, 3T3 Swiss, 3T3-L1, 132-d5 human fetal fibroblasts; 10.1 mouse fibroblasts, 293-T, 3T3, 721, 9L, A2780, A2780ADR, A2780cis, A 172, A20, A253, A431, A-549, ALC, B16, B35, BCP-1 cells, BEAS-2B, bEnd.3, BHK-21, BR 293. BxPC3. C3H-10T1/2, C6/36, Cal-27, CHO, CHO-7, CHO-IR, CHO-K1, CHO-K2, CHO-T, CHO Dhfr−/−, COR-L23, COR-L23/CPR, COR-L23/5010, COR-L23/R23, COS-7, COV-434, CML T1, CMT, CT26, D17, DH82, DU145, DuCaP, EL4, EM2, EM3, EMT6/AR1, EMT6/AR10.0, FM3, H1299, H69, HB54, HB55, HCA2, HEK-293, HeLa, Hepa1c1c7, HL-60, HMEC, HT-29, Jurkat, JY cells, K562 cells, Ku812, KCL22, KG1, KYO1, LNCap, Ma-Mel 1-48, MC-38, MCF-7, MCF-10A, MDA-MB-231, MDA-MB-468, MDA-MB-435, MDCK II, MDCK 11, MOR/0.2R, MONO-MAC 6, MTD-1A, MyEnd, NCI-H69/CPR, NCI-H69/LX10, NCI-H69/LX20, NCI-H69/LX4, NIH-3T3, NALM-1, NW-145, OPCN/OPCT cell lines, Peer, PNT-1A/PNT 2, RenCa, RIN-5F, RMA/RMAS, Saos-2 cells, Sf-9, SkBr3, T2, T-47D, T84, THP1 cell line, U373, U87, U937, VCaP, Vero cells, WM39, WT-49, X63, YAC-1, YAR, and transgenic varieties thereof. Cell lines are available from a variety of sources known to those with skill in the art (see, e.g., the American Type Culture Collection (ATCC) (Manassas, Va.)). In some embodiments, a cell transfected with one or more vectors described herein is used to establish a new cell line comprising one or more vector-derived sequences. In some embodiments, a cell transiently transfected with the components of a CRISPR system as described herein (such as by transient transfection of one or more vectors, or transfection with RNA), and modified through the activity of a CRISPR complex, is used to establish a new cell line comprising cells containing the modification but lacking any other exogenous sequence. In some embodiments, cells transiently or non-transiently transfected with one or more vectors described herein, or cell lines derived from such cells are used in assessing one or more test compounds.

[0538] In some aspects, the present disclosure provides uses of any one of the base editors described herein and a guide RNA targeting this base editor to a target A:T base pair in a nucleic acid molecule in the manufacture of a kit for nucleic acid editing, wherein the nucleic acid editing comprises contacting the nucleic acid molecule with the base editor and guide RNA under conditions suitable for the substitution of the adenine (A) of the A:T nucleobase pair with an guanine (G). In some embodiments of these uses, the nucleic acid molecule is a double-stranded DNA molecule. In some embodiments, the step of contacting induces separation of the double-stranded DNA at a target region. In some embodiments, the step of contacting further comprises nicking one strand of the double-stranded DNA, wherein the one strand comprises an unmutated strand that comprises the T of the target A:T nucleobase pair.

[0539] In some embodiments of the described uses, the step of contacting is performed in vitro. In other embodiments, the step of contacting is performed in vivo. In some embodiments, the step of contacting is performed in a subject (e.g., a human subject or a non-human animal subject). In some embodiments, the step of contacting is performed in a cell, such as a human or non-human animal cell.

[0540] The present disclosure also provides uses of any one of the base editors described herein as a medicament. The present disclosure also provides uses of any one of the complexes of base editors and guide RNAs described herein as a medicament.

[0541] Some aspects of this disclosure provide kits comprising a nucleic acid construct comprising a nucleotide sequence encoding an adenosine deaminase capable of deaminating an adenosine in a deoxyribonucleic acid (DNA) molecule. In some embodiments, the nucleotide sequence encodes any of the adenosine deaminases provided herein. In some embodiments, the nucleotide sequence comprises a heterologous promoter that drives expression of the adenosine deaminase.

[0542] Some aspects of this disclosure provide kits comprising a nucleic acid construct, comprising (a) a nucleotide sequence encoding a napDNAbp (e.g., a Cas9 domain) fused to an adenosine deaminase, or a fusion protein comprising a napDNAbp (e.g., Cas9 domain) and an adenosine deaminase as provided herein; and (b) a heterologous promoter that drives expression of the sequence of (a). In some embodiments, the kit further comprises an expression construct encoding a guide nucleic acid backbone, (e.g., a guide RNA backbone), wherein the construct comprises a cloning site positioned to allow the cloning of a nucleic acid sequence identical or complementary to a target sequence into the guide nucleic acid (e.g., guide RNA backbone).

[0543] Some aspects of this disclosure provide cells comprising any of the adenosine deaminases, fusion proteins, or complexes provided herein. In some embodiments, the cells comprise a nucleotide that encodes any of the adenosine deaminases or fusion proteins provided herein. In some embodiments, the cells comprise any of the nucleotides or vectors provided herein.

[0544] The description of exemplary embodiments of the reporter systems described above is provided for illustration purposes only and not meant to be limiting. Additional reporter systems, e.g., variations of the exemplary systems described in detail above, are also embraced by this disclosure.

[0545] It should be appreciated however, that additional fusion proteins would be apparent to the skilled artisan based on the present disclosure and knowledge in the art.

[0546] The function and advantage of these and other embodiments of the present invention will be more fully understood from the Examples below. The following Examples are intended to illustrate the benefits of the present invention and to describe particular embodiments, but are not intended to exemplify the full scope of the invention. Accordingly, it will be understood that the Examples are not meant to limit the scope of the invention.

### EXAMPLES

[0547] Data provided in the below examples describe the use of adenine base editors that are capable of catalyzing hydrolytic deamination of adenosine (forming inosine, which base pairs like guanine (G)) to treat cancers (e.g., melanoma or glioblastoma) by editing STAT3 such that its resulting protein products are unable to be phosphorylated and therefore, unable to dimerize. Without dimerization, STAT3 cannot translocate to the nucleus to affect transcription and is inactive. Base editors comprising an adenosine deaminase (e.g., adenine base editors) have been described previously, for example, in PCT/US2017/045381 (published as WO 2018/027078); PCT/US2018/056146 (published as WO 2019/079347); PCT/2019/033848 (filed, May 23, 2019), and Gaudelli, N. M. et al. “Programmable base editing of A.T to G.C in genomic DNA without DNA cleavage.” Nature 551, 464-(2017). The first deoxyadenosine deaminases were evolved to accept DNA substrates and deaminate deoxyadenosine (dA) to deoxyinosine. As one example, evolution experiments were performed using the adenosine deaminase acting on tRNA (ADAT) from Escherichia coli (TadA, for tRNA adenosine deaminase A), to engineer adenosine deaminases that act on DNA. Briefly, ecTadA was covalently fused to a dCas9 domain, and libraries of this fusion were assembled containing mutations in the deaminase portion of the construct. Adenine base editors (ABEs) mediate the programmable conversion of A•T to G•C allows for base pair editing.

[0548] Base editing is a form of genome editing that enables the direct, irreversible conversion of one base pair to another at a target genomic locus without requiring double-stranded DNA breaks (DSBs), homology-directed repair (HDR) processes, or donor DNA templates. Compared with standard genome editing methods to introduce point mutations, base editing can proceed more efficiently, and with far fewer undesired products such as stochastic insertions or deletions (indels) or translocations.

[0549] Base editing capabilities have expanded through the development of base editors with different protospacer-adjacent motif (PAM) compatibilities, narrowed editing windows, enhanced DNA specificity, and small-molecule dependence. Fourth-generation base editors (BE4 and BE4-Gam) further improve C•G to T•A editing efficiency and product purity. Seventh-generation ABEs such as ABE7.10 convert A•T to G•C at a wide range of target genomic loci in human cells with a high efficiency, and with a very high degree of product purity (>99%), exceeding the typical performance characteristics of earlier generation base editors, e.g., BE3.

### Example 1. Base Editing of STAT3

[0550] STAT3 is constitutively activated in over 70% of human cancers. It has been found to be a critical mediator of tumorigenesis and tumor progression, and suppresses anti-tumor immune responses in tumors. Preclinical studies have indicated that targeting individual nodes in the STAT3 pathway may have antitumor effects; however, the development of clinical useful small molecules that inhibit STAT3 has been limited. Here, an approach to edit the STAT3 gene so that its resulting protein product cannot be activated (e.g., phosphorylated) using an adenosine base editor (e.g., ABEQ) is described. ABEQ is an ABE with VRQR Cas9, as described herein.

[0551] FIG. 2 is a graph examining the expression levels of different STAT3 variants in a reporter system. STAT3C is a positive control for the upregulation of STAT3 with two cysteine mutations. STAT3-driven signals dropped to 50% in the 705H-STAT3 group, indicating that 705H may be a dominant mutation in STAT3.

[0552] FIG. 3 shows that a STAT3 inhibitors (stattic) reduce STAT3-driven signals at different concentrations. Stattic selectively inhibits STAT3 activation, dimerization, and nuclear translocation by preventing the binding of tyrosine-phosphorylated peptide motifs to the STAT3 SH2 domain (IC₅₀=5.1 μm AT 37° C.). At 10 μM, stattic was found to induce apoptosis in STAT3-dependent breast cancer cells.

[0553] FIGS. 7 and 8 are schematics illustrating some of the base editors targeting STAT3 phosphorylation sites in mice (FIG. 7) and humans (FIG. 8). In mice, the NGA Y705 sgRNA-base editor variant was found to edit the 705 locus. In humans, the base editor showed 83% 705H editing.

[0554] FIGS. 4A-4C show in vitro data demonstrating the use of a base editor to turn off STAT3 and cancer-driven genes. The use of ABEQ targeting position 705 of STAT3 was found to reduce levels of the STAT3 reporter. ABEQ and 705H-sgRNA were incubated in B16 cancer cells (a melanoma cell line). The graph demonstrates the levels of 705H-sgRNA following transfection with the ABE. By day 4, the majority of reads (48%) showed the 705H edit (FIG. 4A). The Western blot shows a reduction of phosphorylated STAT3 (top blot) and the negative feedback reduction of total STAT3 production (middle blot) (FIG. 4B). FIG. 4C illustrates the sequencing reads of whole cell extraction after the ABEQ+sg705H treatment described above.

[0555] FIG. 5 demonstrates that editing the endogenous STAT3 gene use an ABE reduces the STAT3 signal over time, whereas treatment with a STAT3 inhibitor (stattic) produces an effect that does not last over time.

[0556] FIG. 6 shows 705H editing in a cell line. Cell lines were made by transient DNA transfection followed by puromycin selection. The control edited flask shows pABEQ-sgCtrl-puromycin and the 705H edited flask shows pABEQ-sg705H-puromycin. The nucleotide edit is shown in the sequences. The ABEQ-705H-sgRNA-edited cells showed reduced melanin production and proliferation relative to control.

### Example 2. Base Editing of STAT3 to Address Melanoma

[0557] Melanoma is the most deadly form of skin cancer, and its incidence rate is rising faster than that of any other cancer worldwide. It has been found that the pathway controlled by the STAT3 protein relates to the promotion of metastasis, angiogenesis, immune evasion, and a cancer-initiating cell phenotype. See, e.g., Lesinski, “The potential for targeting the STAT3 pathway as a novel therapy for melanoma” Future Oncol., 2013 July; 9(7): 925-927; the entire contents of which are hereby incorporated by reference. STAT3 itself has found to be required for survival in melanoma cells. Current treatment strategies under investigation relating to STAT3 inhibition include inhibition of kinases upstream of STAT3 (e.g., Jak2), targeting STAT3 protein with siRNA, shRNA vectors, small molecules, platinum-based compounds or peptide aptamers; however, none of these have advanced beyond the preclinical stage. Here, an approach to edit the STAT3 gene so that its resulting protein product cannot be activated (e.g., phosphorylated) using an adenosine base editor (ABEQ) in a mouse model of melanoma is described.

[0558] The cells described in FIG. 6 above were used in the in vivo experiment in a mouse model of melanoma. The pre-edited cells (or control cells) were transiently transfected in lentiviral plasmids with a growth disadvantage for Cas9 expression (16 kb) and puromycin maintenance was lost. The cells were delivered intratumorally to mice (on the left side and on the right side). Both sides of a mouse were given the same treatment (e.g., a mouse receiving the sg705H-ABEQ cells was treated on both the left and right side with the sg705H-ABEQ cells). After 12 days, the tumor volumes and lengths were as follows:

| Ear Punch | Treatment | Tumor Volume | | Analysis | | | | Measurement | | | |
|---|---|---|---|---|---|---|---|---|---|---|---|
| mouse ID | Cells | R Tumor | L Tumor | Sum (R + L) | Rank Sum | Max (R, L) | Rank Max | R-Long | R-short | L-Long | L-short |
| 1 | 705H | 441.6 | 153.2 | 594.8 | 2 | 441.6 | 2 | 13.8 | 8.0 | 8.8 | 5.9 |
| 2 | 705H | 163.8 | 125.5 | 289.4 | 5 | 163.8 | 7 | 7.3 | 6.7 | 8.3 | 5.5 |
| 3 | sgCtrl | 208.4 | 231.2 | 439.6 | 3 | 231.2 | 6 | 10.5 | 6.3 | 10.3 | 6.7 |
| 4 | sgCtrl | 0.0 | 66.8 | 66.8 | 10 | 66.8 | 10 | 0.0 | 0.0 | 6.6 | 4.5 |
| 5 | sgCtrl | 443.8 | 681.2 | 1125.0 | 1 | 681.2 | 1 | 13.2 | 8.2 | 11.9 | 10.7 |
| 11 | 705H | 100.9 | 100.0 | 201.0 | 8 | 100.9 | 8 | 6.0 | 5.8 | 7.4 | 5.2 |
| 12 | 705H | 40.8 | 231.2 | 272.0 | 7 | 231.2 | 5 | 5.1 | 4.0 | 10.0 | 6.8 |
| 13 | 705H | 264.7 | 19.4 | 284.0 | 6 | 264.7 | 4 | 8.7 | 7.8 | 4.3 | 3.0 |
| 14 | sgCtrl | 88.8 | 24.9 | 113.7 | 9 | 88.8 | 9 | 7.4 | 4.9 | 4.3 | 3.4 |
| 15 | sgCtrl | 0.0 | 335.0 | 335.0 | 4 | 335.0 | 3 | 0.0 | 0.0 | 11.3 | 7.7 |

### Example 3. Base Editing of STAT3 to Address Glioblastoma

[0559] Glioblastoma multiforme (GBM) is the most common type of primary brain tumor, and the current standard-of-care for GBM patients includes maximal surgical resection, followed by adjuvant radiotherapy and temozolomide (TMZ), a methylator drug. Current treatments are palliative; therefore, there exists a need for curative treatment. Activation of STAT3 has been shown to have a positive correlation with tumor histopathological grade, and the inhibition of STAT3 has been found to improve chemotherapy outcomes in mice with GBM (Alvarez et al., 2004; Yu et al., 2009; Wang et al., 2009; Han et al., 2016). These inhibiting compounds have not translated well in human studies, and have failed Phase III trials. Therefore, base editing of STAT3 to produce an inactive form or to turn off the STAT3 gene was examined.

[0560] Gene editing STAT3 was found to reduce the STAT3 signal in a glioblastoma cells in vitro. As shown in FIG. 9, following administration of gene-edited STAT3, the STAT3 signal decreased 80% with 12% of the cells edited after five days.

[0561] In another experiment, the base editor-sgRNA is administered to a mouse having GBM via intratumoral or intravenous delivery to the tumor microenvironment. Other cancer treatments, such as chemotherapy and/or radiation are also administered in some experimental groups. Tumor progression is followed, and toxicity in response to treatment is measured.

### EQUIVALENTS AND SCOPE, INCORPORATION BY REFERENCE

[0562] Those skilled in the art will recognize, or be able to ascertain using no more than routine experimentation, many equivalents to the specific embodiments of the invention described herein. The scope of the present invention is not intended to be limited to the above description, but rather is as set forth in the appended claims.

[0563] In the claims articles such as “a,” “an,” and “the” may mean one or more than one unless indicated to the contrary or otherwise evident from the context. Claims or descriptions that include “or” between one or more members of a group are considered satisfied if one, more than one, or all of the group members are present in, employed in, or otherwise relevant to a given product or process unless indicated to the contrary or otherwise evident from the context. The invention includes embodiments in which exactly one member of the group is present in, employed in, or otherwise relevant to a given product or process. The invention also includes embodiments in which more than one, or all of the group members are present in, employed in, or otherwise relevant to a given product or process.

[0564] Furthermore, it is to be understood that the invention encompasses all variations, combinations, and permutations in which one or more limitations, elements, clauses, descriptive terms, etc., from one or more of the claims or from relevant portions of the description is introduced into another claim. For example, any claim that is dependent on another claim can be modified to include one or more limitations found in any other claim that is dependent on the same base claim. Furthermore, where the claims recite a composition, it is to be understood that methods of using the composition for any of the purposes disclosed herein are included, and methods of making the composition according to any of the methods of making disclosed herein or other methods known in the art are included, unless otherwise indicated or unless it would be evident to one of ordinary skill in the art that a contradiction or inconsistency would arise.

[0565] Where elements are presented as lists, e.g., in Markush group format, it is to be understood that each subgroup of the elements is also disclosed, and any element(s) can be removed from the group. It is also noted that the term “comprising” is intended to be open and permits the inclusion of additional elements or steps. It should be understood that, in general, where the invention, or aspects of the invention, is/are referred to as comprising particular elements, features, steps, etc., certain embodiments of the invention or aspects of the invention consist, or consist essentially of, such elements, features, steps, etc. For purposes of simplicity those embodiments have not been specifically set forth in haec verba herein. Thus for each embodiment of the invention that comprises one or more elements, features, steps, etc., the invention also provides embodiments that consist or consist essentially of those elements, features, steps, etc.

[0566] Where ranges are given, endpoints are included. Furthermore, it is to be understood that unless otherwise indicated or otherwise evident from the context and/or the understanding of one of ordinary skill in the art, values that are expressed as ranges can assume any specific value within the stated ranges in different embodiments of the invention, to the tenth of the unit of the lower limit of the range, unless the context clearly dictates otherwise. It is also to be understood that unless otherwise indicated or otherwise evident from the context and/or the understanding of one of ordinary skill in the art, values expressed as ranges can assume any subrange within the given range, wherein the endpoints of the subrange are expressed to the same degree of accuracy as the tenth of the unit of the lower limit of the range.

[0567] In addition, it is to be understood that any particular embodiment of the present invention may be explicitly excluded from any one or more of the claims. Where ranges are given, any value within the range may explicitly be excluded from any one or more of the claims. Any embodiment, element, feature, application, or aspect of the compositions and/or methods of the invention, can be excluded from any one or more claims. For purposes of brevity, all of the embodiments in which one or more elements, features, purposes, or aspects is excluded are not set forth explicitly herein.

[0568] All publications, patents and sequence database entries mentioned herein, including those items listed above, are hereby incorporated by reference in their entirety as if each individual publication or patent was specifically and individually indicated to be incorporated by reference. In case of conflict, the present application, including any definitions herein, will control.

What is claimed is:

1. A method for deaminating an adenosine nucleobase (A) or a cytidine nucleobase (C) in a STAT3 gene, the method comprising contacting the STAT3 gene with a base editor in association with a guide RNA (gRNA), wherein the gRNA comprises a guide sequence that is complementary to a target nucleic acid sequence in the STAT3 gene.

2. The method of claim 1, wherein the guide sequence comprises at least 10, 11, 12, 13, 14, 15, 16, 17, 18, 19, 20, 21, 22, 23, 24, or 25 contiguous nucleobases that are at least 80%, 85%, 90%, 95%, 98%, 99%, or 100% complementary to the target nucleic acid sequence of the STAT3 gene.

3. The method of claim 1 or 2, wherein the target nucleic acid sequence in the STAT3 gene comprises or consists of the nucleic acid sequence of any one of SEQ ID NOs: 184-200, or a naturally-occurring variant thereof.

4. The method of any one of claims 1-3, wherein the target nucleic acid sequence in the STAT3 gene comprises or consists of the nucleic acid sequence of any one of SEQ ID NOs:
184-200.

5. The method of any one of claims 1-4, wherein the base editor comprises a nucleic acid programmable DNA binding protein (napDNAbp) and an adenosine deaminase.

6. The method of any one claims 1-4, wherein the base editor comprises a nucleic acid programmable DNA binding protein (napDNAbp) and a cytidine deaminase.

7. The method of claim 5 or 6, wherein the napDNAbp comprises a nuclease or a nickase.

8. The method of claim 7, wherein the base editor nicks the target sequence that is complementary to the guide sequence.

9. The method of any one of claims 1-8, wherein the base editor comprises wild-type Cas9.

10. The method of any one of claims 1-8, wherein the base editor comprises wild-type SpCas9, SaCas9-KKH, Cas9-VQR, Cas9-VRQR, Cas9-VRER, Cas9-NG, CP1028, CP1041, CP1041-NG, Cpf1, iSpyMac, SpCas9-NRRH, or SpCas9-NRCH.

11. The method of any one of claims 1-10, wherein the guide sequence of the gRNA comprises the nucleic acid sequence 5′-UGCCCCAUACCUGAAGACCA-3′ (SEQ ID NO: 14).

12. The method of any one of claims 1-10, wherein the guide sequence of the gRNA comprises the nucleic acid sequence 5′-UUCAGGUAUGGGGCAGCGCC-3′ (SEQ ID NO: 15).

13. The method of any one of claims 1-10, wherein the guide sequence of the gRNA comprises the nucleic acid sequence 5′-CAGGUAUGGGGCAGCGCCUG-3′ (SEQ ID NO: 16).

14. The method of any one of claims 1-13, wherein the gRNA comprises the structure
5′-[guide sequence]-[Cas9 binding sequence]-3′, and wherein the Cas9 binding sequence is at least 70%, 75%, 80%, 85%, 90%, 95%, 96%, 97%, 98%, 99%, or 99.5% identical to
(SEQ ID NO: 247)
5′GUUUUAGAGCUAGAAAUAGCAAGUUAAAAUAAAGGCUAGUCCGUUAU
CAACUUGAAAAAGUGGCACCGAGUCGGUGC-3′.

15. The method of any one of claims 1-14 wherein the gRNA comprises the structure
5′-[guide sequence]-[Cas9 binding sequence]-3′, and wherein the Cas9 binding sequence comprises
(SEQ ID NO: 247)
5′GUUUUAGAGCUAGAAAUAGCAAGUUAAAAUAAAGGCUAGUCCGUUAU
CAACUUGAAAAAGUGGCACCGAGUCGGUGC-3′.

16. The method of any one of claims 1-15, wherein the gRNA comprises the nucleic acid sequence
(SEQ ID NO: 246)
5′UGCCCCAUACCUGAAGACCAGUUUUAGAGCUAGAAAUAGCAAGUUAA
AAUAAAGGCUAGUCCGUUAUCAACUUGAAAAAGUGGCACCGAGUCGGUG
C-3′.

17. The method of any one of claims 1-15, wherein the gRNA comprises the nucleic acid sequence
(SEQ ID NO: 248)
5′UUCAGGUAUGGGGCAGCGCCGUUUUAGAGCUAGAAAUAGCAAGUUAA
AAUAAAGGCUAGUCCGUUAUCAACUUGAAAAAGUGGCACCGAGUCGGUG
C-3′.

18. The method of any one of claims 1-15, wherein the gRNA comprises the nucleic acid sequence
(SEQ ID NO: 249)
5′CAGGUAUGGGGCAGCGCCUGGUUUUAGAGCUAGAAAUAGCAAGUUAA
AAUAAAGGCUAGUCCGUUAUCAACUUGAAAAAGUGGCACCGAGUCGGUG
C-3′.

19. The method of any one of claim 1-5 or 7-18, wherein deaminating the adenosine nucleobase in the STAT3 gene results in a T-A base pair in the STAT3 gene being mutated to a C-G base pair in the STAT3 gene.

20. The method of any one of claims 1-19, wherein deaminating the nucleobase yields a Y705H mutation in an amino acid sequence encoded by the STAT3 gene.

21. The method of any one of claims 1-19, wherein deaminating the nucleobase yields a Y705F mutation in an amino acid sequence encoded by the STAT3 gene.

22. The method of any one of claims 1-19, wherein deaminating the nucleobase yields a S727X mutation in an amino acid sequence encoded by the STAT3 gene (where X is any amino acid except serine, threonine, or tyrosine).

23. The method of any one of claims 1-22, wherein deaminating a nucleobase in the STAT3 gene results in a dominant negative STAT3 protein.

24. The method of any one of claims 1-23, wherein the method is performed in vitro.

25. The method of any one of claims 1-23, wherein the method is performed in vivo.

26. The method of any one of claims 1-23, wherein the method is performed ex vivo.

27. The method of any one of claims 1-26, wherein the method is performed in a subject.

28. The method of claim 27, wherein the subject has or is suspected of having a STAT3 pathway-associated disorder.

29. The method of claim 28, wherein the STAT3 pathway-associated disorder is a cancer.

30. The method of claim 29, wherein the cancer is a solid tumor.

31. The method of claim 30, wherein the cancer is selected from the group consisting of melanoma; glioblastoma; Adenoid Cystic Carcinoma; Adrenal Gland Cancer; Amyloidosis; Ataxia-Telangiectasia; Atypical Mole Syndrome; Basal Cell Carcinoma; Bile Duct Cancer; Birt Hogg Dube Syndrome; Bladder Cancer; Bone Cancer; Brain Tumor; Breast Cancer; Breast Cancer in Men; Carcinoid Tumor; Cervical Cancer; Colorectal Cancer; Ductal Carcinoma; Endometrial Cancer; Esophageal Cancer; Gastric Cancer; Gastrontestinal Stromal Tumor—GIST; HER2-Positive Breast Cancer; Islet Cell Tumor; Juvenile Polyposis Syndrome; Kidney Cancer; Laryngeal Cancer; Leukemia—Acute Lymphoblastic Leukemia; Leukemia—Acute Lymphocytic (ALL); Leukemia—Acute Myeloid AML; Leukemia—Adult; Leukemia—Childhood; Leukemia—Chronic Lymphocytic—CLL; Leukemia—Chronic Myeloid—CML; Liver Cancer; Lobular Carcinoma; Lung Cancer; Lung Cancer—Small Cell; Lymphoma—Hodgkin's; Lymphoma—Non-Hodgkin's; Malignant Glioma; Melanoma; Meningioma; Multiple Myeloma; Myelodysplastic Syndrome (MDS); Nasopharyngeal Cancer; Neuroendocrine Tumor; Oral Cancer; Osteosarcoma; Ovarian Cancer; Pancreatic Cancer; Pancreatic Neuroendocrine Tumors; Parathyroid Cancer; Penile Cancer; Peritoneal Cancer; Peutz-Jeghers Syndrome; Pituitary Gland Tumor; Polycythemia Vera; Prostate Cancer; Renal Cell Carcinoma; Retinoblastoma; Salivary Gland Cancer; Sarcoma; Sarcoma—Kaposi; Skin Cancer; Small Intestine Cancer; Stomach Cancer; Testicular Cancer; Thymoma; Thyroid Cancer; Uterine (Endometrial) Cancer; Vaginal Cancer; and Wilms' Tumor.

32. The method of any one of claims 27-31, wherein the subject is human.

33. The method of any one of claims 27-32, wherein the subject is in utero.

34. The method of any one of claims 1-33, wherein the base editor is an adenine base editor or a cytidine base editor.

35. The method of any one of claims 1-34, wherein the base editor comprises the structure: NH2-[first nuclear localization sequence]-[first adenosine deaminase]-[second adenosine deaminase]-[Cas9 domain]-[second nuclear localization sequence]-COOH, and each instance of “-” comprises an optional linker.

36. The method of claim 35, wherein the first nuclear localization sequence comprises the amino acid sequence KRTADGSEFESPKKKRKV (SEQ ID NO: 243), or a variant thereof that is at least 70%, 75%, 80%, 85%, 90%, 95%, 96%, 97%, 98%, 99%, or 99.5% identical thereto, and the second nuclear localization sequence comprises the amino acid sequence KRTADGSEFEPKKKRKV (SEQ ID NO: 244), or a variant thereof that is at least 70%, 75%, 80%, 85%, 90%, 95%, 96%, 97%, 98%, 99%, or 99.5% identical thereto.

37. The method of claim 35 or 35, wherein the first adenosine deaminase comprises the amino acid sequence SEVEFSHEYWMRHALTLAKRAWDEREVPVGAVLVHNNRVIGEGWNRPIGRHDPTA HAEIMALRQGGLVMQNYRLIDATLYVTLEPCVMCAGAMIHSRIGRVVFGARDAKTG AAGSLMDVLHHPGMNHRVEITEGILADECAALLSDFFRMRRQEIKAQKKAQSSTD (SEQ ID NO: 242), or a variant thereof that is at least 70%, 75%, 80%, 85%, 90%, 95%, 96%, 97%, 98%, 99%, or 99.5% identical thereto.

38. The method of any one of claims 35-37, wherein the second adenosine deaminase comprises the amino acid sequence SEVEFSHEYWMRHALTLAKRARDEREVPVGAVLVLNNRVIGEGWNRAIGLHDPTA HAEIMALRQGGLVMQNYRLIDATLYVTFEPCVMCAGAMIHSRIGRVVFGVRNAKTG AAGSLMDVLHYPGMNHRVEITEGILADECAALLCYFFRMPRQVFNAQKKAQSSTD (SEQ ID NO: 245), or a variant thereof that is at least 70%, 75%, 80%, 85%, 90%, 95%, 96%, 97%, 98%, 99%, or 99.5% identical thereto.

39. The method of any one of claims 35-38, wherein the Cas9 domain comprises the amino acid sequence DKKYSIGLDIGTNSVGWAVITDEYKVPSKKFKVLGNTDRHSIKKNLIGALLFDSGETA EATRLKRTARRRYTRRKNRICYLQEIFSNEMAKVDDSFFHRLEESFLVEEDKKHERHPI FGNIVDEVAYHEKYPTIYHLRKKLVDSTDKADLRLIYLALAHMIKFRGHFLIEGDLNP DNSDVDKLFIQLVQTYNQLFEENPINASGVDAKAILSARLSKSRRLENLIAQLPGEKK NGLFGNLIALSLGLTPNFKSNFDLAEDAKLQLSKDTYDDDLDNLLAQIGDQYADLFL AAKNLSDAILLSDILRVNTEITKAPLSASMIKRYDEHHQDLTLLKALVRQQLPEKYKEI FFDQSKNGYAGYIDGGASQEEFYKFIKPILEKMDGTEELLVKLNREDLLRKQRTFDNG SIPHQIHLGELHAILRRQEDFYPFLKDNREKIEKILTFRIPYYVGPLARGNSRFAWMTR KSEETITPWNFEEVVDKGASAQSFIERMTNFDKNLPNEKVLPKHSLLYEYFTVYNELT KVKYVTEGMRKPAFLSGEQKKAIVDLLFKTNRKVTVKQLKEDYFKKIECFDSVEISG VEDRFNASLGTYHDLLKIIKDKDFLDNEENEDILEDIVLTLTLFEDREMIEERLKTYAH LFDDKVMKQLKRRRYTGWGRLSRKLINGIRDKQS GKTILDFLKS DGFANRNFMQLIH DDSLTFKEDIQKAQVSGQGDSLHEHIANLAGSPAIKKGILQTVKVVDELVKVMGRHK PENIVIEMARENQTTQKGQKNSRERMKRIEEGIKELGSQILKEHPVENTQLQNEKLYL YYLQNGRDMYVDQELDINRLSDYDVDAIVPQSFLKDDSIDNKVLTRSDKNRGKSDN VPSEEVVKKMKNYWRQLLNAKLITQRKFDNLTKAERGGLSELDKAGFIKRQLVETR QITKHVAQILDSRMNTKYDENDKLIREVKVITLKS KLVSDFRKDFQFYKVREINNYHH AHDAYLNAVVGTALIKKYPKLESEFVYGDYKVYDVRKMIAKSEQEIGKATAKYFFYS NIMNFFKTEITLANGEIRKRPLIETNGETGEIVWDKGRDFATVRKVLSMPQVNIVKKT EVQTGGFSKESILPKRNSDKLIARKKDWDPKKYGGFVSPTVAYSVLVVAKVEKGKSK KLKSVKELLGITIMERSSFEKNPIDFLEAKGYKEVKKDLIIKLPKYSLFELENGRKRML ASARELQKGNELALPSKYVNFLYLASHYEKLKGSPEDNEQKQLFVEQHKHYLDEIIE QISEFSKRVILADANLDKVLSAYNKHRDKPIREQAENIIHLFTLTNLGAPAAFKYFDTTI DRKQYRSTKEVLDATLIHQSITGLYETRIDLSQLGGD (SEQ ID NO: 133), or a variant thereof that is at least 70%, 75%, 80%, 85%, 90%, 95%, 96%, 97%, 98%, 99%, or 99.5% identical thereto.

40. The method of any one of claims 35-39, wherein the base editor comprises the amino acid sequence MKRTADGSEFESPKKKRKVSEVEFSHEYWMRHALTLAKRAWDEREVPVGAVLVHN NRVIGEGWNRPIGRHDPTAHAEIMALRQGGLVMQNYRLIDATLYVTLEPCVMCAGA MIESRIGRVVFGARDAKTGAAGSLMDVLHHPGMNHRVEITEGILADECAALLSDFFR MRRQEIKAQKKAQSSTDSGGSSGGSSGSETPGTSESATPESSGGSSGGSSEVEFSHEY WMRHALTLAKRARDEREVPVGAVLVLNNRVIGEGWNRAIGLHDPTAHAEIMALRQ GGLVMQNYRLIDATLYVTFEPCVMCAGAMIHSRIGRVVFGVRNAKTGAAGSLMDV LHYPGMNHRVEITEGILADECAALLCYFFRMPRQVFNAQKKAQSSTDSGGSSGGSSG SETPGTSESATPESSGGSSGGSDKKYSIGLAIGTNSVGWAVITDEYKVPSKKFKVLGN TDRHSIKKNLIGALLFDSGETAEATRLKRTARRRYTRRKNRICYLQEIFSNEMAKVDD SFFHRLEESFLVEEDKKHERHPIFGNIVDEVAYHEKYPTIYHLRKKLVDSTDKADLRL IYLALAHMIKFRGHFLIEGDLNPDNSDVDKLFIQLVQTYNQLFEENPINASGVDAKAI LSARLSKSRRLENLIAQLPGEKKNGLFGNLIALSLGLTPNFKSNFDLAEDAKLQLSKD TYDDDLDNLLAQIGDQYADLFLAAKNLSDAILLSDILRVNTEITKAPLSASMIKRYDE HHQDLTLLKALVRQQLPEKYKEIFFDQSKNGYAGYIDGGASQEEFYKFIKPILEKMD GTEELLVKLNREDLLRKQRTFDNGSIPHQIHLGELHAILRRQEDFYPFLKDNREKIEKI LTFRIPYYVGPLARGNSRFAWMTRKSEETITPWNFEEVVDKGASAQSFIERMTNFDK NLPNEKVLPKHSLLYEYFTVYNELTKVKYVTEGMRKPAFLSGEQKKAIVDLLFKTNR KVTVKQLKEDYFKKIECFDSVEISGVEDRFNASLGTYHDLLKIIKDKDFLDNEENEDI LEDIVLTLTLFEDREMIEERLKTYAHLFDDKVMKQLKRRRYTGWGRLSRKUNGIRD KQSGKTILDFLKSDGFANRNFMQLIHDDSLTFKEDIQKAQVSGQGDSLHEHIANLAG SPAIKKGILQTVKVVDELVKVMGRHKPENIVIEMARENQTTQKGQKNSRERMKRIEE GIKELGSQILKEHPVENTQLQNEKLYLYYLQNGRDMYVDQELDINRLSDYDVDHIVP QSFLKDDSIDNKVLTRSDKNRGKSDNVPSEEVVKKMKNYWRQLLNAKLITQRKFDN LTKAERGGLSELDKAGFIKRQLVETRQITKHVAQILDSRMNTKYDENDKLIREVKVIT LKSKLVSDFRKDFQFYKVREINNYHHAHDAYLNAVVGTALIKKYPKLESEFVYGDY KVYDVRKMIAKSEQEIGKATAKYFFYSNIMNFFKTEITLANGEIRKRPLIETNGETGEI VWDKGRDFATVRKVLSMPQVNIVKKTEVQTGGFSKESILPKRNSDKLIARKKDWDP KKYGGFVSPTVAYSVLVVAKVEKGKSKKLKSVKELLGITIMERSSFEKNPIDFLEAK GYKEVKKDLIIKLPKYSLFELENGRKRMLASARELQKGNELALPSKYVNFLYLASHY EKLKGSPEDNEQKQLFVEQHKHYLDEIIEQISEFSKRVILADANLDKVLSAYNKHRDK PIREQAENIIHLFTLTNLGAPAAFKYFDTTIDRKQYRSTKEVLDATLIHQSITGLYETRI DLSQLGGDSGGSKRTADGSEFEPKKKRKV (SEQ ID NO: 180), or a variant thereof that is at least 70%, 75%, 80%, 85%, 90%, 95%, 96%, 97%, 98%, 99%, or 99.5% identical thereto.

41. The method of any one of claims 1-40, wherein the method is a method for treating a STAT3 pathway-associated disorder.

42. The method of claim 41, wherein the STAT3 pathway-associated disorder is a cancer.

43. The method of claim 42, wherein the cancer is a solid tumor.

44. The method of claim 43, wherein the cancer is selected from the group consisting of: melanoma; glioblastoma; Adenoid Cystic Carcinoma; Adrenal Gland Cancer; Amyloidosis; Ataxia-Telangiectasia; Atypical Mole Syndrome; Basal Cell Carcinoma; Bile Duct Cancer; Birt Hogg Dube Syndrome; Bladder Cancer; Bone Cancer; Brain Tumor; Breast Cancer; Breast Cancer in Men; Carcinoid Tumor; Cervical Cancer; Colorectal Cancer; Ductal Carcinoma; Endometrial Cancer; Esophageal Cancer; Gastric Cancer; Gastrontestinal Stromal Tumor—GIST; HER2-Positive Breast Cancer; Islet Cell Tumor; Juvenile Polyposis Syndrome; Kidney Cancer; Laryngeal Cancer; Leukemia—Acute Lymphoblastic Leukemia; Leukemia—Acute Lymphocytic (ALL); Leukemia—Acute Myeloid AML; Leukemia—Adult; Leukemia—Childhood; Leukemia—Chronic Lymphocytic—CLL; Leukemia—Chronic Myeloid—CML; Liver Cancer; Lobular Carcinoma; Lung Cancer; Lung Cancer—Small Cell; Lymphoma—Hodgkin's; Lymphoma—Non-Hodgkin's; Malignant Glioma; Melanoma; Meningioma; Multiple Myeloma; Myelodysplastic Syndrome (MDS); Nasopharyngeal Cancer; Neuroendocrine Tumor; Oral Cancer; Osteosarcoma; Ovarian Cancer; Pancreatic Cancer; Pancreatic Neuroendocrine Tumors; Parathyroid Cancer; Penile Cancer; Peritoneal Cancer; Peutz-Jeghers Syndrome; Pituitary Gland Tumor; Polycythemia Vera; Prostate Cancer; Renal Cell Carcinoma; Retinoblastoma; Salivary Gland Cancer; Sarcoma; Sarcoma—Kaposi; Skin Cancer; Small Intestine Cancer; Stomach Cancer; Testicular Cancer; Thymoma; Thyroid Cancer; Uterine (Endometrial) Cancer; Vaginal Cancer; and Wilms' Tumor.

45. The method of any one of claims 1-44, further comprising administering an anti-cancer therapy to the subject.

46. The method of claim 45, wherein the anti-cancer therapy is selected from the group consisting of: chemotherapy, surgery, radiation, immunotherapy, and gene therapy.

47. The method of claim 46, wherein the immunotherapy comprises administration of a checkpoint inhibitor.

48. The method of claim 47, wherein the checkpoint inhibitor is an anti-PD1 antibody.

49. A guide RNA comprising a guide sequence, wherein the guide sequence of the guide RNA comprises or consists of:
(SEQ ID NO: 14)
5′-UGCCCCAUACCUGAAGACCA-3′,
(SEQ ID NO: 15)
5′- UUCAGGUAUGGGGCAGCGCC-3,
and
(SEQ ID NO: 16)
5′-CAGGUAUGGGGCAGCGCCUG-3′.

50. The guide RNA of claim 49, wherein the gRNA comprises the structure
5′-[guide sequence]-[Cas9 binding sequence]-3′, and wherein the Cas9 binding sequence is at least 70%, 75%, 80%, 85%, 90%, 95%, 96%, 97%, 98%, 99%, or 99.5% identical to
(SEQ ID NO: 246)
5′UGCCCCAUACCUGAAGACCAGUUUUAGAGCUAGAAAUAGCAAGUUAA
AAUAAAGGCUAGUCCGUUAUCAACUUGAAAAAGUGGCACCGAGUCGGUG
C-3′;
(SEQ ID NO: 248)
5′UUCAGGUAUGGGGCAGCGCCGUUUUAGAGCUAGAAAUAGCAAGUUAA
AAUAAAGGCUAGUCCGUUAUCAACUUGAAAAAGUGGCACCGAGUCGGUG
C-3′;
or
(SEQ ID NO: 249)
5′CAGGUAUGGGGCAGCGCCUGGUUUUAGAGCUAGAAAUAGCAAGUUAA
AAUAAAGGCUAGUCCGUUAUCAACUUGAAAAAGUGGCACCGAGUCGGUG
C-3′.

51. The guide RNA of claim 50, wherein the gRNA comprises the nucleic acid sequence
(SEQ ID NO: 246)
5′UGCCCCAUACCUGAAGACCAGUUUUAGAGCUAGAAAUAGCAAGUUAA
AAUAAAGGCUAGUCCGUUAUCAACUUGAAAAAGUGGCACCGAGUCGGUG
C-3′;
(SEQ ID NO: 248)
5′UUCAGGUAUGGGGCAGCGCCGUUUUAGAGCUAGAAAUAGCAAGUUAA
AAUAAAGGCUAGUCCGUUAUCAACUUGAAAAAGUGGCACCGAGUCGGUG
C-3′;
or
(SEQ ID NO: 249)
5′CAGGUAUGGGGCAGCGCCUGGUUUUAGAGCUAGAAAUAGCAAGUUAA
AAUAAAGGCUAGUCCGUUAUCAACUUGAAAAAGUGGCACCGAGUCGGUG
C-3′.

52. A nucleic acid encoding the guide RNA of any one of claims 49-51.

53. A complex comprising (i) a base editor, and (ii) the guide RNA (gRNA) of any one of claims 49-52.

54. The complex of claim 53, wherein the base editor is an adenine base editor.

55. The complex of any one of claims 53-54, wherein the base editor is any of the base editors provided herein.

56. A pharmaceutical composition comprising the complex of any one of claims 53-55.

57. A pharmaceutical composition comprising the guide RNA of any one of claims 49-51.

58. A pharmaceutical composition comprising the nucleic acid of claim 52.

59. The pharmaceutical composition of any one of claims 56-58, further comprising a pharmaceutically acceptable excipient.

60. The pharmaceutical composition of any one of claims 49-59, further comprising a cationic lipid or cationic polymer.

61. A virus comprising a nucleic acid encoding the guide RNA of any one of claims 49-51.

62. A virus comprising a nucleic acid encoding
(i) a base editor, and (ii) the guide RNA of any one of claims 49-51.

63. The virus of claim 61 or 62, wherein the virus is an adenovirus.

64. The virus of claim 63, wherein the virus is a recombinant adeno-associated virus (rAAV).

65. A vector comprising the nucleic acid of claim 52.

66. The vector of claim 65, wherein the nucleic acid encoding the gRNA is under the control of a heterologous promoter.

67. The vector of claim 65 or 66, further comprising a nucleic acid encoding a base editor.

68. The vector of claim 67, wherein the base editor comprises a fusion protein comprising a nucleic acid programmable DNA binding protein (napDNAbp) and an adenosine deaminase.

69. The vector of claim 67 or 68, wherein the base editor is under the control of a heterologous promoter.

70. A kit comprising
(i) a base editor comprising a nucleic acid programmable DNA binding protein (napDNAbp) and an adenosine deaminase; and
(ii) a guide RNA (gRNA), wherein the gRNA comprises any one of the guide sequences of claim 49.

The application's sequence listing, which the Patent Office published only in electronic form, follows.

SEQUENCE LISTING (415 sequences)

SEQ ID NO: 1 - protein, 167 aa, Escherichia coli
MSEVEFSHEYWMRHALTLAKRAWDEREVPVGAVLVHNNRVIGEGWNRPIGRHDPTAHAEIMALRQGGLVMQNYRLIDATLYVTLEPCVMCAGAMIHSRIGRVVFGARDAKTGAAGSLMDVLHHPGMNHRVEITEGILADECAALLSDFFRMRRQEIKAQKKAQSSTD

SEQ ID NO: 2 - protein, 178 aa, Escherichia coli
MRRAFITGVFFLSEVEFSHEYWMRHALTLAKRAWDEREVPVGAVLVHNNRVIGEGWNRPIGRHDPTAHAEIMALRQGGLVMQNYRLIDATLYVTLEPCVMCAGAMIHSRIGRVVFGARDAKTGAAGSLMDVLHHPGMNHRVEITEGILADECAALLSDFFRMRRQEIKAQKKAQSSTD

SEQ ID NO: 3 - protein, 160 aa, Staphylococcus aureus
MGSHMTNDIYFMTLAIEEAKKAAQLGEVPIGAIITKDDEVIARAHNLRETLQQPTAHAEHIAIERAAKVLGSWRLEGCTLYVTLEPCVMCAGTIVMSRIPRVVYGADDPKGGCSGSLMNLLQQSNFNHRAIVDKGVLKEACSTLLTTFFKNLRANKKSTN

SEQ ID NO: 4 - protein, 161 aa, Bacillus subtilis
MTQDELYMKEAIKEAKKAEEKGEVPIGAVLVINGEIIARAHNLRETEQRSIAHAEMLVIDEACKALGTWRLEGATLYVTLEPCPMCAGAVVLSRVEKVVFGAFDPKGGCSGTLMNLLQEERFNHQAEVVSGVLEEECGGMLSAFFRELRKKKKAARKNLSE

SEQ ID NO: 5 - protein, 183 aa, Salmonella typhimurium
MPPAFITGVTSLSDVELDHEYWMRHALTLAKRAWDEREVPVGAVLVHNHRVIGEGWNRPIGRHDPTAHAEIMALRQGGLVLQNYRLLDTTLYVTLEPCVMCAGAMVHSRIGRVVFGARDAKTGAAGSLIDVLHHPGMNHRVEIIEGVLRDECATLLSDFFRMRRQEIKALKKADRAEGAGPAV

SEQ ID NO: 6 - protein, 164 aa, Shewanella putrefaciens
MDEYWMQVAMQMAEKAEAAGEVPVGAVLVKDGQQIATGYNLSISQHDPTAHAEILCLRSAGKKLENYRLLDATLYITLEPCAMCAGAMVHSRIARVVYGARDEKTGAAGTVVNLLQHPAFNHQVEVTSGVLAEACSAQLSRFFKRRRDEKKALKLAQRAQQGIE

SEQ ID NO: 7 - protein, 173 aa, Haemophilus influenzae
MDAAKVRSEFDEKMMRYALELADKAEALGEIPVGAVLVDDARNIIGEGWNLSIVQSDPTAHAEIIALRNGAKNIQNYRLLNSTLYVTLEPCTMCAGAILHSRIKRLVFGASDYKTGAIGSRFHFFDDYKMNHTLEITSGVLAEECSQKLSTFFQKRREEKKIEKALLKSLSDK

SEQ ID NO: 8 - protein, 161 aa, Caulobacter crescentus
MRTDESEDQDHRMMRLALDAARAAAEAGETPVGAVILDPSTGEVIATAGNGPIAAHDPTAHAEIAAMRAAAAKLGNYRLTDLTLVVTLEPCAMCAGAISHARIGRVVFGADDPKGGAVVHGPKFFAQPTCHWRPEVTGGVLADESADLLRGFFRARRKAKI

SEQ ID NO: 9 - protein, 179 aa, Geobacter sulfurreducens
MSSLKKTPIRDDAYWMGKAIREAAKAAARDEVPIGAVIVRDGAVIGRGHNLREGSNDPSAHAEMIAIRQAARRSANWRLTGATLYVTLEPCLMCMGAIILARLERVVFGCYDPKGGAAGSLYDLSADPRLNHQVRLSPGVCQEECGTMLSDFFRDLRRRKKAKATPALFIDERKVPPEP

SEQ ID NO: 10 - protein, 166 aa, Escherichia coli
SEVEFSHEYWMRHALTLAKRARDEREVPVGAVLVLNNRVIGEGWNRAIGLHDPTAHAEIMALRQGGLVMQNYRLIDATLYVTFEPCVMCAGAMIHSRIGRVVFGVRNAKTGAAGSLMDVLHYPGMNHRVEITEGILADECAALLCYFFRMPRQVFNAQKKAQSSTD

SEQ ID NO: 11 - DNA, 20 bp, Artificial Sequence
  Synthetic
tgccccatacctgaagacca

SEQ ID NO: 12 - DNA, 20 bp, Artificial Sequence
  Synthetic
ttcaggtatggggcagcgcc

SEQ ID NO: 13 - DNA, 20 bp, Artificial Sequence
  Synthetic
caggtatggggcagcgcctg

SEQ ID NO: 14 - RNA, 20 nt, Artificial Sequence
  Synthetic
ugccccauaccugaagacca

SEQ ID NO: 15 - RNA, 20 nt, Artificial Sequence
  Synthetic
uucagguauggggcagcgcc

SEQ ID NO: 16 - RNA, 20 nt, Artificial Sequence
  Synthetic
cagguauggggcagcgccug

SEQ ID NO: 17 - DNA, 20 bp, Artificial Sequence
  Synthetic
tgccccgtacctgaagacca

SEQ ID NO: 18 - DNA, 20 bp, Artificial Sequence
  Synthetic
aggtacggggcagcacctgc

SEQ ID NO: 19 - DNA, 20 bp, Artificial Sequence
  Synthetic
ttcaggtacggggcagcacc

SEQ ID NO: 20 - RNA, 20 nt, Artificial Sequence
  Synthetic
ugccccguaccugaagacca

SEQ ID NO: 21 - RNA, 20 nt, Artificial Sequence
  Synthetic
agguacggggcagcaccugc

SEQ ID NO: 22 - RNA, 20 nt, Artificial Sequence
  Synthetic
uucagguacggggcagcacc

SEQ ID NO: 23 - protein, 413 aa, Artificial Sequence
  Synthetic
CLAEGTRIFDPVTGTTHRIEDVVDGRKPIHVVAAAKDGTLLARPVVSWFDQGTRDVIGLRIAGGAIVWATPDHKVLTEYGWRAAGELRKGDRVAGPGGSGNSLALSLTADQMVSALLDAEPPILYSEYDPTSPFSEASMMGLLTNLADRELVHMINWAKRVPGFVDLTLHDQAHLLECAWLEILMIGLVWRSMEHPGKLLFAPNLLLDRNQGKCVEGMVEIFDMLLATSSRFRMMNLQGEEFVCLKSIILLNSGVYTFLSSTLKSLEEKDHIHRALDKITDTLIHLMAKAGLTLQQQHQRLAQLLLILSHIRHMSNKGMEHLYSMKYKNVVPLYDLLLEMLDAHRLHAGGSGASRVQAFADALDDKFLHDMLAEELRYSVIREVLPTRRARTFDLEVEELHTLVAEGVVVHNC

SEQ ID NO: 24 - protein, 413 aa, Artificial Sequence
  Synthetic
CLAEGTRIFDPVTGTTHRIEDVVDGRKPIHVVAVAKDGTLLARPVVSWFDQGTRDVIGLRIAGGAIVWATPDHKVLTEYGWRAAGELRKGDRVAGPGGSGNSLALSLTADQMVSALLDAEPPILYSEYDPTSPFSEASMMGLLTNLADRELVHMINWAKRVPGFVDLTLHDQAHLLECAWLEILMIGLVWRSMEHPGKLLFAPNLLLDRNQGKCVEGMVEIFDMLLATSSRFRMMNLQGEEFVCLKSIILLNSGVYTFLSSTLKSLEEKDHIHRALDKITDTLIHLMAKAGLTLQQQHQRLAQLLLILSHIRHMSNKGMEHLYSMKYTNVVPLYDLLLEMLDAHRLHAGGSGASRVQAFADALDDKFLHDMLAEELRYSVIREVLPTRRARTFDLEVEELHTLVAEGVVVHNC

SEQ ID NO: 25 - protein, 413 aa, Artificial Sequence
  Synthetic
CLAEGTRIFDPVTGTTHRIEDVVDGRKPIHVVAAAKDGTLLARPVVSWFDQGTRDVIGLRIAGGATVWATPDHKVLTEYGWRAAGELRKGDRVAGPGGSGNSLALSLTADQMVSALLDAEPPIPYSEYDPTSPFSEASMMGLLTNLADRELVHMINWAKRVPGFVDLTLHDQAHLLECAWLEILMIGLVWRSMEHPGKLLFAPNLLLDRNQGKCVEGMVEIFDMLLATSSRFRMMNLQGEEFVCLKSIILLNSGVYTFLSSTLKSLEEKDHIHRALDKITDTLIHLMAKAGLTLQQQHQRLAQLLLILSHIRHMSNKGMEHLYSMKYKNVVPLYDLLLEMLDAHRLHAGGSGASRVQAFADALDDKFLHDMLAEGLRYSVIREVLPTRRARTFDLEVEELHTLVAEGVVVHNC

SEQ ID NO: 26 - protein, 413 aa, Artificial Sequence
  Synthetic
CLAEGTRIFDPVTGTTHRIEDVVDGRKPIHVVAAAKDGTLLARPVVSWFDQGTRDVIGLRIAGGATVWATPDHKVLTEYGWRAAGELRKGDRVAGPGGSGNSLALSLTADQMVSALLDAEPPILYSEYDPTSPFSEASMMGLLTNLADRELVHMINWAKRVPGFVDLTLHDQAHLLECAWLEILMIGLVWRSMEHPGKLLFAPNLLLDRNQGKCVEGMVEIFDMLLATSSRFRMMNLQGEEFVCLKSIILLNSGVYTFLSSTLKSLEEKDHIHRALDKITDTLIHLMAKAGLTLQQQHQRLAQLLLILSHIRHMSNKGMEHLYSMKYKNVVPLYDLLLEMLDAHRLHAGGSGASRVQAFADALDDKFLHDMLAEELRYSVIREVLPTRRARTFDLEVEELHTLVAEGVVVHNC

SEQ ID NO: 27 - protein, 413 aa, Artificial Sequence
  Synthetic
CLAEGTRIFDPVTGTTHRIEDVVDGRKPIHVVAAAKDGTLLARPVVSWFDQGTRDVIGLRIAGGATVWATPDHKVLTEYGWRAAGELRKGDRVAGPGGSGNSLALSLTADQMVSALLDAEPPIPYSEYDPTSPFSEASMMGLLTNLADRELVHMINWAKRVPGFVDLTLHDQAHLLECAWLEILMIGLVWRSMEHPGKLLFAPNLLLDRNQGKCVEGMVEIFDMLLATSSRFRMMNLQGEEFVCLKSIILLNSGVYTFLSSTLKSLEEKDHIHRALDKITDTLIHLMAKAGLTLQQQHQRLAQLLLILSHIRHMSNKGMEHLYSMKYKNVVPLYDLLLEMLDAHRLHAGGSGASRVQAFADALDDKFLHDMLAEELRYSVIREVLPTRRARTFDLEVEELHTLVAEGVVVHNC

SEQ ID NO: 28 - protein, 413 aa, Artificial Sequence
  Synthetic
CLAEGTRIFDPVTGTTHRIEDVVDGRKPIHVVAAAKDGTLLARPVVSWFDQGTRDVIGLRIAGGATVWATPDHKVLTEYGWRAAGELRKGDRVAGPGGSGNSLALSLTADQMVSALLDAEPPILYSEYNPTSPFSEASMMGLLTNLADRELVHMINWAKRVPGFVDLTLHDQAHLLERAWLEILMIGLVWRSMEHPGKLLFAPNLLLDRNQGKCVEGMVEIFDMLLATSSRFRMMNLQGEEFVCLKSIILLNSGVYTFLSSTLKSLEEKDHIHRALDKITDTLIHLMAKAGLTLQQQHQRLAQLLLILSHIRHMSNKGMEHLYSMKYKNVVPLYDLLLEMLDAHRLHAGGSGASRVQAFADALDDKFLHDMLAEGLRYSVIREVLPTRRARTFDLEVEELHTLVAEGVVVHNC

SEQ ID NO: 29 - protein, 413 aa, Artificial Sequence
  Synthetic
CLAEGTRIFDPVTGTTHRIEDVVDGRKPIHVVAAAKDGTLLARPVVSWFDQGTRDVIGLRIAGGAIVWATPDHKVLTEYGWRAAGELRKGDRVAGPGGSGNSLALSLTADQMVSALLDAEPPILYSEYDPTSPFSEASMMGLLTNLADRELVHMINWAKRVPGFVDLTLHDQAHLLERAWLEILMIGLVWRSMEHPGKLLFAPNLLLDRNQGKCVEGMVEIFDMLLATSSRFRMMNLQGEEFVCLKSIILLNSGVYTFLSSTLKSLEEKDHIHRALDKITDTLIHLMAKAGLTLQQQHQRLAQLLLILSHIRHMSNKGMEHLYSMKYKNVVPLYDLLLEMLDAHRLHAGGSGASRVQAFADALDDKFLHDMLAEGLRYSVIREVLPTRRARTFDLEVEELHTLVAEGVVVHNC

SEQ ID NO: 30 - protein, 413 aa, Artificial Sequence
  Synthetic
CLAEGTRIFDPVTGTTHRIEDVVDGRKPIHVVAVAKDGTLLARPVVSWFDQGTRDVIGLRIAGGATVWATPDHKVLTEYGWRAAGELRKGDRVAGPGGSGNSLALSLTADQMVSALLDAEPPILYSEYDPTSPFSEASMMGLLTNLADRELVHMINWAKRVPGFVDLTLHDQAHLLERAWLEILMIGLVWRSMEHPGKLLFAPNLLLDRNQGKCVEGMVEIFDMLLATSSRFRMMNLQGEEFVCLKSIILLNSGVYTFLSSTLKSLEEKDHIHRALDKITDTLIHLMAKAGLTLQQQHQRLAQLLLILSHIRHMSNKGMEHLYSMKYKNVVPLYDLLLEMLDAHRLHAGGSGASRVQAFADALDDKFLHDMLAEELRYSVIREVLPTRRARTFDLEVEELHTLVAEGVVVHNC

SEQ ID NO: 31 - DNA, 33 bp, Artificial Sequence
  Synthetic
gccaacatgaggatcacccatgtctgcagggcc

SEQ ID NO: 32 - protein, 131 aa, Artificial Sequence
  Synthetic
GSASNFTQFVLVDNGGTGDVTVAPSNFANGVAEWISSNSRSQAYKVTCSVRQSSAQNRKYTIKVEVPKVATQTVGGEELPVAGWRSYLNMELTIPIFATNSDCELIVKAMQGLLKDGNPIPSAIAANSGIY

SEQ ID NO: 33 - protein, 770 aa, Homo Sapiens
MAQWNQLQQLDTRYLEQLHQLYSDSFPMELRQFLAPWIESQDWAYAASKESHATLVFHNLLGEIDQQYSRFLQESNVLYQHNLRRIKQFLQSRYLEKPMEIARIVARCLWEESRLLQTAATAAQQGGQANHPTAAVVTEKQQMLEQHLQDVRKRVQDLEQKMKVVENLQDDFDFNYKTLKSQGDMQDLNGNNQSVTRQKMQQLEQMLTALDQMRRSIVSELAGLLSAMEYVQKTLTDEELADWKRRQQIACIGGPPNICLDRLENWITSLAESQLQTRQQIKKLEELQQKVSYKGDPIVQHRPMLEERIVELFRNLMKSAFVVERQPCMPMHPDRPLVIKTGVQFTTKVRLLVKFPELNYQLKIKVCIDKDSGDVAALRGSRKFNILGTNTKVMNMEESNNGSLSAEFKHLTLREQRCGNGGRANCDASLIVTEELHLITFETEVYHQGLKIDLETHSLPVVVISNICQMPNAWASILWYNMLTNNPKNVNFFTKPPIGTWDQVAEVLSWQFSSTTKRGLSIEQLTTLAEKLLGPGVNYSGCQITWAKFCKENMAGKGFSFWVWLDNIIDLVKKYILALWNEGYIMGFISKERERAILSTKPPGTFLLRFSESSKEGGVTFTWVEKDISGKTQIQSVEPYTKQQLNNMSFAEIIMGYKIMDATNILVSPLVYLYPDIPKEEAFGKYCRPESQEHPEADPGSAAPYLKTKFICVTPTTCSNTIDLPMSPRTLDSLMQFGNNGEGAEPSAGGQFESLTFDMELTSECATSPM

SEQ ID NO: 34 - DNA, 4978 bp, Homo Sapiens
ggtttccggagctgcggcggcgcagactgggagggggagccgggggttccgacgtcgcagccgagggaacaagccccaaccggatcctggacaggcaccccggcttggcgctgtctctccccctcggctcggagaggcccttcggcctgagggagcctcgccgcccgtccccggcacacgcgcagccccggcctctcggcctctgccggagaaacagttgggacccctgattttagcaggatggcccaatggaatcagctacagcagcttgacacacggtacctggagcagctccatcagctctacagtgacagcttcccaatggagctgcggcagtttctggccccttggattgagagtcaagattgggcatatgcggccagcaaagaatcacatgccactttggtgtttcataatctcctgggagagattgaccagcagtatagccgcttcctgcaagagtcgaatgttctctatcagcacaatctacgaagaatcaagcagtttcttcagagcaggtatcttgagaagccaatggagattgcccggattgtggcccggtgcctgtgggaagaatcacgccttctacagactgcagccactgcggcccagcaagggggccaggccaaccaccccacagcagccgtggtgacggagaagcagcagatgctggagcagcaccttcaggatgtccggaagagagtgcaggatctagaacagaaaatgaaagtggtagagaatctccaggatgactttgatttcaactataaaaccctcaagagtcaaggagacatgcaagatctgaatggaaacaaccagtcagtgaccaggcagaagatgcagcagctggaacagatgctcactgcgctggaccagatgcggagaagcatcgtgagtgagctggcggggcttttgtcagcgatggagtacgtgcagaaaactctcacggacgaggagctggctgactggaagaggcggcaacagattgcctgcattggaggcccgcccaacatctgcctagatcggctagaaaactggataacgtcattagcagaatctcaacttcagacccgtcaacaaattaagaaactggaggagttgcagcaaaaagtttcctacaaaggggaccccattgtacagcaccggccgatgctggaggagagaatcgtggagctgtttagaaacttaatgaaaagtgcctttgtggtggagcggcagccctgcatgcccatgcatcctgaccggcccctcgtcatcaagaccggcgtccagttcactactaaagtcaggttgctggtcaaattccctgagttgaattatcagcttaaaattaaagtgtgcattgacaaagactctggggacgttgcagctctcagaggatcccggaaatttaacattctgggcacaaacacaaaagtgatgaacatggaagaatccaacaacggcagcctctctgcagaattcaaacacttgaccctgagggagcagagatgtgggaatgggggccgagccaattgtgatgcttccctgattgtgactgaggagctgcacctgatcacctttgagaccgaggtgtatcaccaaggcctcaagattgacctagagacccactccttgccagttgtggtgatctccaacatctgtcagatgccaaatgcctgggcgtccatcctgtggtacaacatgctgaccaacaatcccaagaatgtaaacttttttaccaagcccccaattggaacctgggatcaagtggccgaggtcctgagctggcagttctcctccaccaccaagcgaggactgagcatcgagcagctgactacactggcagagaaactcttgggacctggtgtgaattattcagggtgtcagatcacatgggctaaattttgcaaagaaaacatggctggcaagggcttctccttctgggtctggctggacaatatcattgaccttgtgaaaaagtacatcctggccctttggaacgaagggtacatcatgggctttatcagtaaggagcgggagcgggccatcttgagcactaagcctccaggcaccttcctgctaagattcagtgaaagcagcaaagaaggaggcgtcactttcacttgggtggagaaggacatcagcggtaagacccagatccagtccgtggaaccatacacaaagcagcagctgaacaacatgtcatttgctgaaatcatcatgggctataagatcatggatgctaccaatatcctggtgtctccactggtctatctctatcctgacattcccaaggaggaggcattcggaaagtattgtcggccagagagccaggagcatcctgaagctgacccaggtagcgctgccccatacctgaagaccaagtttatctgtgtgacaccaacgacctgcagcaataccattgacctgccgatgtccccccgcactttagattcattgatgcagtttggaaataatggtgaaggtgctgaaccctcagcaggagggcagtttgagtccctcacctttgacatggagttgacctcggagtgcgctacctcccccatgtgaggagctgagaacggaagctgcagaaagatacgactgaggcgcctacctgcattctgccacccctcacacagccaaaccccagatcatctgaaactactaactttgtggttccagattttttttaatctcctacttctgctatctttgagcaatctgggcacttttaaaaatagagaaatgagtgaatgtgggtgatctgcttttatctaaatgcaaataaggatgtgttctctgagacccatgatcaggggatgtggcggggggtggctagagggagaaaaaggaaatgtcttgtgttgttttgttcccctgccctcctttctcagcagctttttgttattgttgttgttgttcttagacaagtgcctcctggtgcctgcggcatccttctgcctgtttctgtaagcaaatgccacaggccacctatagctacatactcctggcattgcactttttaaccttgctgacatccaaatagaagataggactatctaagccctaggtttctttttaaattaagaaataataacaattaaagggcaaaaaacactgtatcagcatagcctttctgtatttaagaaacttaagcagccgggcatggtggctcacgcctgtaatcccagcactttgggaggccgaggcggatcataaggtcaggagatcaagaccatcctggctaacacggtgaaaccccgtctctactaaaagtacaaaaaattagctgggtgtggtggtgggcgcctgtagtcccagctactcgggaggctgaggcaggagaatcgcttgaacctgagaggcggaggttgcagtgagccaaaattgcaccactgcacactgcactccatcctgggcgacagtctgagactctgtctcaaaaaaaaaaaaaaaaaaaagaaacttcagttaacagcctccttggtgctttaagcattcagcttccttcaggctggtaatttatataatccctgaaacgggcttcaggtcaaacccttaagacatctgaagctgcaacctggcctttggtgttgaaataggaaggtttaaggagaatctaagcattttagacttttttttataaatagacttattttcctttgtaatgtattggccttttagtgagtaaggctgggcagagggtgcttacaaccttgactccctttctccctggacttgatctgctgtttcagaggctaggttgtttctgtgggtgccttatcagggctgggatacttctgattctggcttccttcctgccccaccctcccgaccccagtccccctgatcctgctagaggcatgtctccttgcgtgtctaaaggtccctcatcctgtttgttttaggaatcctggtctcaggacctcatggaagaagagggggagagagttacaggttggacatgatgcacactatggggccccagcgacgtgtctggttgagctcagggaatatggttcttagccagtttcttggtgatatccagtggcacttgtaatggcgtcttcattcagttcatgcagggcaaaggcttactgataaacttgagtctgccctcgtatgagggtgtatacctggcctccctctgaggctggtgactcctccctgctggggccccacaggtgaggcagaacagctagagggcctccccgcctgcccgccttggctggctagctcgcctctcctgtgcgtatgggaacacctagcacgtgctggatgggctgcctctgactcagaggcatggccggatttggcaactcaaaaccaccttgcctcagctgatcagagtttctgtggaattctgtttgttaaatcaaattagctggtctctgaattaagggggagacgaccttctctaagatgaacagggttcgccccagtcctcctgcctggagacagttgatgtgtcatgcagagctcttacttctccagcaacactcttcagtacataataagcttaactgataaacagaatatttagaaaggtgagacttgggcttaccattgggtttaaatcatagggacctagggcgagggttcagggcttctctggagcagatattgtcaagttcatggccttaggtagcatgtatctggtcttaactctgattgtagcaaaagttctgagaggagctgagccctgttgtggcccattaaagaacagggtcctcaggccctgcccgcttcctgtccactgccccctccccatccccagcccagccgagggaatcccgtgggttgcttacctacctataaggtggtttataagctgctgtcctggccactgcattcaaattccaatgtgtacttcatagtgtaaaaatttatattattgtgaggttttttgtcttttttttttttttttttttttggtatattgctgtatctactttaacttccagaaataaacgttatataggaaccgtaaaaa

SEQ ID NO: 35 - protein, 769 aa, Homo Sapiens
MAQWNQLQQLDTRYLEQLHQLYSDSFPMELRQFLAPWIESQDWAYAASKESHATLVFHNLLGEIDQQYSRFLQESNVLYQHNLRRIKQFLQSRYLEKPMEIARIVARCLWEESRLLQTAATAAQQGGQANHPTAAVVTEKQQMLEQHLQDVRKRVQDLEQKMKVVENLQDDFDFNYKTLKSQGDMQDLNGNNQSVTRQKMQQLEQMLTALDQMRRSIVSELAGLLSAMEYVQKTLTDEELADWKRRQQIACIGGPPNICLDRLENWITSLAESQLQTRQQIKKLEELQQKVSYKGDPIVQHRPMLEERIVELFRNLMKSAFVVERQPCMPMHPDRPLVIKTGVQFTTKVRLLVKFPELNYQLKIKVCIDKDSGDVAALRGSRKFNILGTNTKVMNMEESNNGSLSAEFKHLTLREQRCGNGGRANCDASLIVTEELHLITFETEVYHQGLKIDLETHSLPVVVISNICQMPNAWASILWYNMLTNNPKNVNFFTKPPIGTWDQVAEVLSWQFSSTTKRGLSIEQLTTLAEKLLGPGVNYSGCQITWAKFCKENMAGKGFSFWVWLDNIIDLVKKYILALWNEGYIMGFISKERERAILSTKPPGTFLLRFSESSKEGGVTFTWVEKDISGKTQIQSVEPYTKQQLNNMSFAEIIMGYKIMDATNILVSPLVYLYPDIPKEEAFGKYCRPESQEHPEADPGAAPYLKTKFICVTPTTCSNTIDLPMSPRTLDSLMQFGNNGEGAEPSAGGQFESLTFDMELTSECATSPM

SEQ ID NO: 36 - DNA, 4896 bp, Homo Sapiens
gtcgcagccgagggaacaagccccaaccggatcctggacaggcaccccggcttggcgctgtctctccccctcggctcggagaggcccttcggcctgagggagcctcgccgcccgtccccggcacacgcgcagccccggcctctcggcctctgccggagaaacaggatggcccaatggaatcagctacagcagcttgacacacggtacctggagcagctccatcagctctacagtgacagcttcccaatggagctgcggcagtttctggccccttggattgagagtcaagattgggcatatgcggccagcaaagaatcacatgccactttggtgtttcataatctcctgggagagattgaccagcagtatagccgcttcctgcaagagtcgaatgttctctatcagcacaatctacgaagaatcaagcagtttcttcagagcaggtatcttgagaagccaatggagattgcccggattgtggcccggtgcctgtgggaagaatcacgccttctacagactgcagccactgcggcccagcaagggggccaggccaaccaccccacagcagccgtggtgacggagaagcagcagatgctggagcagcaccttcaggatgtccggaagagagtgcaggatctagaacagaaaatgaaagtggtagagaatctccaggatgactttgatttcaactataaaaccctcaagagtcaaggagacatgcaagatctgaatggaaacaaccagtcagtgaccaggcagaagatgcagcagctggaacagatgctcactgcgctggaccagatgcggagaagcatcgtgagtgagctggcggggcttttgtcagcgatggagtacgtgcagaaaactctcacggacgaggagctggctgactggaagaggcggcaacagattgcctgcattggaggcccgcccaacatctgcctagatcggctagaaaactggataacgtcattagcagaatctcaacttcagacccgtcaacaaattaagaaactggaggagttgcagcaaaaagtttcctacaaaggggaccccattgtacagcaccggccgatgctggaggagagaatcgtggagctgtttagaaacttaatgaaaagtgcctttgtggtggagcggcagccctgcatgcccatgcatcctgaccggcccctcgtcatcaagaccggcgtccagttcactactaaagtcaggttgctggtcaaattccctgagttgaattatcagcttaaaattaaagtgtgcattgacaaagactctggggacgttgcagctctcagaggatcccggaaatttaacattctgggcacaaacacaaaagtgatgaacatggaagaatccaacaacggcagcctctctgcagaattcaaacacttgaccctgagggagcagagatgtgggaatgggggccgagccaattgtgatgcttccctgattgtgactgaggagctgcacctgatcacctttgagaccgaggtgtatcaccaaggcctcaagattgacctagagacccactccttgccagttgtggtgatctccaacatctgtcagatgccaaatgcctgggcgtccatcctgtggtacaacatgctgaccaacaatcccaagaatgtaaacttttttaccaagcccccaattggaacctgggatcaagtggccgaggtcctgagctggcagttctcctccaccaccaagcgaggactgagcatcgagcagctgactacactggcagagaaactcttgggacctggtgtgaattattcagggtgtcagatcacatgggctaaattttgcaaagaaaacatggctggcaagggcttctccttctgggtctggctggacaatatcattgaccttgtgaaaaagtacatcctggccctttggaacgaagggtacatcatgggctttatcagtaaggagcgggagcgggccatcttgagcactaagcctccaggcaccttcctgctaagattcagtgaaagcagcaaagaaggaggcgtcactttcacttgggtggagaaggacatcagcggtaagacccagatccagtccgtggaaccatacacaaagcagcagctgaacaacatgtcatttgctgaaatcatcatgggctataagatcatggatgctaccaatatcctggtgtctccactggtctatctctatcctgacattcccaaggaggaggcattcggaaagtattgtcggccagagagccaggagcatcctgaagctgacccaggcgctgccccatacctgaagaccaagtttatctgtgtgacaccaacgacctgcagcaataccattgacctgccgatgtccccccgcactttagattcattgatgcagtttggaaataatggtgaaggtgctgaaccctcagcaggagggcagtttgagtccctcacctttgacatggagttgacctcggagtgcgctacctcccccatgtgaggagctgagaacggaagctgcagaaagatacgactgaggcgcctacctgcattctgccacccctcacacagccaaaccccagatcatctgaaactactaactttgtggttccagattttttttaatctcctacttctgctatctttgagcaatctgggcacttttaaaaatagagaaatgagtgaatgtgggtgatctgcttttatctaaatgcaaataaggatgtgttctctgagacccatgatcaggggatgtggcggggggtggctagagggagaaaaaggaaatgtcttgtgttgttttgttcccctgccctcctttctcagcagctttttgttattgttgttgttgttcttagacaagtgcctcctggtgcctgcggcatccttctgcctgtttctgtaagcaaatgccacaggccacctatagctacatactcctggcattgcactttttaaccttgctgacatccaaatagaagataggactatctaagccctaggtttctttttaaattaagaaataataacaattaaagggcaaaaaacactgtatcagcatagcctttctgtatttaagaaacttaagcagccgggcatggtggctcacgcctgtaatcccagcactttgggaggccgaggcggatcataaggtcaggagatcaagaccatcctggctaacacggtgaaaccccgtctctactaaaagtacaaaaaattagctgggtgtggtggtgggcgcctgtagtcccagctactcgggaggctgaggcaggagaatcgcttgaacctgagaggcggaggttgcagtgagccaaaattgcaccactgcacactgcactccatcctgggcgacagtctgagactctgtctcaaaaaaaaaaaaaaaaaaaagaaacttcagttaacagcctccttggtgctttaagcattcagcttccttcaggctggtaatttatataatccctgaaacgggcttcaggtcaaacccttaagacatctgaagctgcaacctggcctttggtgttgaaataggaaggtttaaggagaatctaagcattttagacttttttttataaatagacttattttcctttgtaatgtattggccttttagtgagtaaggctgggcagagggtgcttacaaccttgactccctttctccctggacttgatctgctgtttcagaggctaggttgtttctgtgggtgccttatcagggctgggatacttctgattctggcttccttcctgccccaccctcccgaccccagtccccctgatcctgctagaggcatgtctccttgcgtgtctaaaggtccctcatcctgtttgttttaggaatcctggtctcaggacctcatggaagaagagggggagagagttacaggttggacatgatgcacactatggggccccagcgacgtgtctggttgagctcagggaatatggttcttagccagtttcttggtgatatccagtggcacttgtaatggcgtcttcattcagttcatgcagggcaaaggcttactgataaacttgagtctgccctcgtatgagggtgtatacctggcctccctctgaggctggtgactcctccctgctggggccccacaggtgaggcagaacagctagagggcctccccgcctgcccgccttggctggctagctcgcctctcctgtgcgtatgggaacacctagcacgtgctggatgggctgcctctgactcagaggcatggccggatttggcaactcaaaaccaccttgcctcagctgatcagagtttctgtggaattctgtttgttaaatcaaattagctggtctctgaattaagggggagacgaccttctctaagatgaacagggttcgccccagtcctcctgcctggagacagttgatgtgtcatgcagagctcttacttctccagcaacactcttcagtacataataagcttaactgataaacagaatatttagaaaggtgagacttgggcttaccattgggtttaaatcatagggacctagggcgagggttcagggcttctctggagcagatattgtcaagttcatggccttaggtagcatgtatctggtcttaactctgattgtagcaaaagttctgagaggagctgagccctgttgtggcccattaaagaacagggtcctcaggccctgcccgcttcctgtccactgccccctccccatccccagcccagccgagggaatcccgtgggttgcttacctacctataaggtggtttataagctgctgtcctggccactgcattcaaattccaatgtgtacttcatagtgtaaaaatttatattattgtgaggttttttgtcttttttttttttttttttttttggtatattgctgtatctactttaacttccagaaataaacgttatataggaaccgtc

SEQ ID NO: 37 - protein, 722 aa, Homo Sapiens
MAQWNQLQQLDTRYLEQLHQLYSDSFPMELRQFLAPWIESQDWAYAASKESHATLVFHNLLGEIDQQYSRFLQESNVLYQHNLRRIKQFLQSRYLEKPMEIARIVARCLWEESRLLQTAATAAQQGGQANHPTAAVVTEKQQMLEQHLQDVRKRVQDLEQKMKVVENLQDDFDFNYKTLKSQGDMQDLNGNNQSVTRQKMQQLEQMLTALDQMRRSIVSELAGLLSAMEYVQKTLTDEELADWKRRQQIACIGGPPNICLDRLENWITSLAESQLQTRQQIKKLEELQQKVSYKGDPIVQHRPMLEERIVELFRNLMKSAFVVERQPCMPMHPDRPLVIKTGVQFTTKVRLLVKFPELNYQLKIKVCIDKDSGDVAALRGSRKFNILGTNTKVMNMEESNNGSLSAEFKHLTLREQRCGNGGRANCDASLIVTEELHLITFETEVYHQGLKIDLETHSLPVVVISNICQMPNAWASILWYNMLTNNPKNVNFFTKPPIGTWDQVAEVLSWQFSSTTKRGLSIEQLTTLAEKLLGPGVNYSGCQITWAKFCKENMAGKGFSFWVWLDNIIDLVKKYILALWNEGYIMGFISKERERAILSTKPPGTFLLRFSESSKEGGVTFTWVEKDISGKTQIQSVEPYTKQQLNNMSFAEIIMGYKIMDATNILVSPLVYLYPDIPKEEAFGKYCRPESQEHPEADPGSAAPYLKTKFICVTPFIDAVWK

SEQ ID NO: 38 - DNA, 4871 bp, Homo Sapiens
gtcgcagccgagggaacaagccccaaccggatcctggacaggcaccccggcttggcgctgtctctccccctcggctcggagaggcccttcggcctgagggagcctcgccgcccgtccccggcacacgcgcagccccggcctctcggcctctgccggagaaacagttgggacccctgattttagcaggatggcccaatggaatcagctacagcagcttgacacacggtacctggagcagctccatcagctctacagtgacagcttcccaatggagctgcggcagtttctggccccttggattgagagtcaagattgggcatatgcggccagcaaagaatcacatgccactttggtgtttcataatctcctgggagagattgaccagcagtatagccgcttcctgcaagagtcgaatgttctctatcagcacaatctacgaagaatcaagcagtttcttcagagcaggtatcttgagaagccaatggagattgcccggattgtggcccggtgcctgtgggaagaatcacgccttctacagactgcagccactgcggcccagcaagggggccaggccaaccaccccacagcagccgtggtgacggagaagcagcagatgctggagcagcaccttcaggatgtccggaagagagtgcaggatctagaacagaaaatgaaagtggtagagaatctccaggatgactttgatttcaactataaaaccctcaagagtcaaggagacatgcaagatctgaatggaaacaaccagtcagtgaccaggcagaagatgcagcagctggaacagatgctcactgcgctggaccagatgcggagaagcatcgtgagtgagctggcggggcttttgtcagcgatggagtacgtgcagaaaactctcacggacgaggagctggctgactggaagaggcggcaacagattgcctgcattggaggcccgcccaacatctgcctagatcggctagaaaactggataacgtcattagcagaatctcaacttcagacccgtcaacaaattaagaaactggaggagttgcagcaaaaagtttcctacaaaggggaccccattgtacagcaccggccgatgctggaggagagaatcgtggagctgtttagaaacttaatgaaaagtgcctttgtggtggagcggcagccctgcatgcccatgcatcctgaccggcccctcgtcatcaagaccggcgtccagttcactactaaagtcaggttgctggtcaaattccctgagttgaattatcagcttaaaattaaagtgtgcattgacaaagactctggggacgttgcagctctcagaggatcccggaaatttaacattctgggcacaaacacaaaagtgatgaacatggaagaatccaacaacggcagcctctctgcagaattcaaacacttgaccctgagggagcagagatgtgggaatgggggccgagccaattgtgatgcttccctgattgtgactgaggagctgcacctgatcacctttgagaccgaggtgtatcaccaaggcctcaagattgacctagagacccactccttgccagttgtggtgatctccaacatctgtcagatgccaaatgcctgggcgtccatcctgtggtacaacatgctgaccaacaatcccaagaatgtaaacttttttaccaagcccccaattggaacctgggatcaagtggccgaggtcctgagctggcagttctcctccaccaccaagcgaggactgagcatcgagcagctgactacactggcagagaaactcttgggacctggtgtgaattattcagggtgtcagatcacatgggctaaattttgcaaagaaaacatggctggcaagggcttctccttctgggtctggctggacaatatcattgaccttgtgaaaaagtacatcctggccctttggaacgaagggtacatcatgggctttatcagtaaggagcgggagcgggccatcttgagcactaagcctccaggcaccttcctgctaagattcagtgaaagcagcaaagaaggaggcgtcactttcacttgggtggagaaggacatcagcggtaagacccagatccagtccgtggaaccatacacaaagcagcagctgaacaacatgtcatttgctgaaatcatcatgggctataagatcatggatgctaccaatatcctggtgtctccactggtctatctctatcctgacattcccaaggaggaggcattcggaaagtattgtcggccagagagccaggagcatcctgaagctgacccaggtagcgctgccccatacctgaagaccaagtttatctgtgtgacaccattcattgatgcagtttggaaataatggtgaaggtgctgaaccctcagcaggagggcagtttgagtccctcacctttgacatggagttgacctcggagtgcgctacctcccccatgtgaggagctgagaacggaagctgcagaaagatacgactgaggcgcctacctgcattctgccacccctcacacagccaaaccccagatcatctgaaactactaactttgtggttccagattttttttaatctcctacttctgctatctttgagcaatctgggcacttttaaaaatagagaaatgagtgaatgtgggtgatctgcttttatctaaatgcaaataaggatgtgttctctgagacccatgatcaggggatgtggcggggggtggctagagggagaaaaaggaaatgtcttgtgttgttttgttcccctgccctcctttctcagcagctttttgttattgttgttgttgttcttagacaagtgcctcctggtgcctgcggcatccttctgcctgtttctgtaagcaaatgccacaggccacctatagctacatactcctggcattgcactttttaaccttgctgacatccaaatagaagataggactatctaagccctaggtttctttttaaattaagaaataataacaattaaagggcaaaaaacactgtatcagcatagcctttctgtatttaagaaacttaagcagccgggcatggtggctcacgcctgtaatcccagcactttgggaggccgaggcggatcataaggtcaggagatcaagaccatcctggctaacacggtgaaaccccgtctctactaaaagtacaaaaaattagctgggtgtggtggtgggcgcctgtagtcccagctactcgggaggctgaggcaggagaatcgcttgaacctgagaggcggaggttgcagtgagccaaaattgcaccactgcacactgcactccatcctgggcgacagtctgagactctgtctcaaaaaaaaaaaaaaaaaaaagaaacttcagttaacagcctccttggtgctttaagcattcagcttccttcaggctggtaatttatataatccctgaaacgggcttcaggtcaaacccttaagacatctgaagctgcaacctggcctttggtgttgaaataggaaggtttaaggagaatctaagcattttagacttttttttataaatagacttattttcctttgtaatgtattggccttttagtgagtaaggctgggcagagggtgcttacaaccttgactccctttctccctggacttgatctgctgtttcagaggctaggttgtttctgtgggtgccttatcagggctgggatacttctgattctggcttccttcctgccccaccctcccgaccccagtccccctgatcctgctagaggcatgtctccttgcgtgtctaaaggtccctcatcctgtttgttttaggaatcctggtctcaggacctcatggaagaagagggggagagagttacaggttggacatgatgcacactatggggccccagcgacgtgtctggttgagctcagggaatatggttcttagccagtttcttggtgatatccagtggcacttgtaatggcgtcttcattcagttcatgcagggcaaaggcttactgataaacttgagtctgccctcgtatgagggtgtatacctggcctccctctgaggctggtgactcctccctgctggggccccacaggtgaggcagaacagctagagggcctccccgcctgcccgccttggctggctagctcgcctctcctgtgcgtatgggaacacctagcacgtgctggatgggctgcctctgactcagaggcatggccggatttggcaactcaaaaccaccttgcctcagctgatcagagtttctgtggaattctgtttgttaaatcaaattagctggtctctgaattaagggggagacgaccttctctaagatgaacagggttcgccccagtcctcctgcctggagacagttgatgtgtcatgcagagctcttacttctccagcaacactcttcagtacataataagcttaactgataaacagaatatttagaaaggtgagacttgggcttaccattgggtttaaatcatagggacctagggcgagggttcagggcttctctggagcagatattgtcaagttcatggccttaggtagcatgtatctggtcttaactctgattgtagcaaaagttctgagaggagctgagccctgttgtggcccattaaagaacagggtcctcaggccctgcccgcttcctgtccactgccccctccccatccccagcccagccgagggaatcccgtgggttgcttacctacctataaggtggtttataagctgctgtcctggccactgcattcaaattccaatgtgtacttcatagtgtaaaaatttatattattgtgaggttttttgtcttttttttttttttttttttttggtatattgctgtatctactttaacttccagaaataaacgttatataggaaccgtc

SEQ ID NO: 39 - protein, 721 aa, Homo Sapiens
MAQWNQLQQLDTRYLEQLHQLYSDSFPMELRQFLAPWIESQDWAYAASKESHATLVFHNLLGEIDQQYSRFLQESNVLYQHNLRRIKQFLQSRYLEKPMEIARIVARCLWEESRLLQTAATAAQQGGQANHPTAAVVTEKQQMLEQHLQDVRKRVQDLEQKMKVVENLQDDFDFNYKTLKSQGDMQDLNGNNQSVTRQKMQQLEQMLTALDQMRRSIVSELAGLLSAMEYVQKTLTDEELADWKRRQQIACIGGPPNICLDRLENWITSLAESQLQTRQQIKKLEELQQKVSYKGDPIVQHRPMLEERIVELFRNLMKSAFVVERQPCMPMHPDRPLVIKTGVQFTTKVRLLVKFPELNYQLKIKVCIDKDSGDVAALRGSRKFNILGTNTKVMNMEESNNGSLSAEFKHLTLREQRCGNGGRANCDASLIVTEELHLITFETEVYHQGLKIDLETHSLPVVVISNICQMPNAWASILWYNMLTNNPKNVNFFTKPPIGTWDQVAEVLSWQFSSTTKRGLSIEQLTTLAEKLLGPGVNYSGCQITWAKFCKENMAGKGFSFWVWLDNIIDLVKKYILALWNEGYIMGFISKERERAILSTKPPGTFLLRFSESSKEGGVTFTWVEKDISGKTQIQSVEPYTKQQLNNMSFAEIIMGYKIMDATNILVSPLVYLYPDIPKEEAFGKYCRPESQEHPEADPGAAPYLKTKFICVTPFIDAVWK

SEQ ID NO: 40 - DNA, 4846 bp, Homo Sapiens
gtcgcagccgagggaacaagccccaaccggatcctggacaggcaccccggcttggcgctgtctctccccctcggctcggagaggcccttcggcctgagggagcctcgccgcccgtccccggcacacgcgcagccccggcctctcggcctctgccggagaaacaggatggcccaatggaatcagctacagcagcttgacacacggtacctggagcagctccatcagctctacagtgacagcttcccaatggagctgcggcagtttctggccccttggattgagagtcaagattgggcatatgcggccagcaaagaatcacatgccactttggtgtttcataatctcctgggagagattgaccagcagtatagccgcttcctgcaagagtcgaatgttctctatcagcacaatctacgaagaatcaagcagtttcttcagagcaggtatcttgagaagccaatggagattgcccggattgtggcccggtgcctgtgggaagaatcacgccttctacagactgcagccactgcggcccagcaagggggccaggccaaccaccccacagcagccgtggtgacggagaagcagcagatgctggagcagcaccttcaggatgtccggaagagagtgcaggatctagaacagaaaatgaaagtggtagagaatctccaggatgactttgatttcaactataaaaccctcaagagtcaaggagacatgcaagatctgaatggaaacaaccagtcagtgaccaggcagaagatgcagcagctggaacagatgctcactgcgctggaccagatgcggagaagcatcgtgagtgagctggcggggcttttgtcagcgatggagtacgtgcagaaaactctcacggacgaggagctggctgactggaagaggcggcaacagattgcctgcattggaggcccgcccaacatctgcctagatcggctagaaaactggataacgtcattagcagaatctcaacttcagacccgtcaacaaattaagaaactggaggagttgcagcaaaaagtttcctacaaaggggaccccattgtacagcaccggccgatgctggaggagagaatcgtggagctgtttagaaacttaatgaaaagtgcctttgtggtggagcggcagccctgcatgcccatgcatcctgaccggcccctcgtcatcaagaccggcgtccagttcactactaaagtcaggttgctggtcaaattccctgagttgaattatcagcttaaaattaaagtgtgcattgacaaagactctggggacgttgcagctctcagaggatcccggaaatttaacattctgggcacaaacacaaaagtgatgaacatggaagaatccaacaacggcagcctctctgcagaattcaaacacttgaccctgagggagcagagatgtgggaatgggggccgagccaattgtgatgcttccctgattgtgactgaggagctgcacctgatcacctttgagaccgaggtgtatcaccaaggcctcaagattgacctagagacccactccttgccagttgtggtgatctccaacatctgtcagatgccaaatgcctgggcgtccatcctgtggtacaacatgctgaccaacaatcccaagaatgtaaacttttttaccaagcccccaattggaacctgggatcaagtggccgaggtcctgagctggcagttctcctccaccaccaagcgaggactgagcatcgagcagctgactacactggcagagaaactcttgggacctggtgtgaattattcagggtgtcagatcacatgggctaaattttgcaaagaaaacatggctggcaagggcttctccttctgggtctggctggacaatatcattgaccttgtgaaaaagtacatcctggccctttggaacgaagggtacatcatgggctttatcagtaaggagcgggagcgggccatcttgagcactaagcctccaggcaccttcctgctaagattcagtgaaagcagcaaagaaggaggcgtcactttcacttgggtggagaaggacatcagcggtaagacccagatccagtccgtggaaccatacacaaagcagcagctgaacaacatgtcatttgctgaaatcatcatgggctataagatcatggatgctaccaatatcctggtgtctccactggtctatctctatcctgacattcccaaggaggaggcattcggaaagtattgtcggccagagagccaggagcatcctgaagctgacccaggcgctgccccatacctgaagaccaagtttatctgtgtgacaccattcattgatgcagtttggaaataatggtgaaggtgctgaaccctcagcaggagggcagtttgagtccctcacctttgacatggagttgacctcggagtgcgctacctcccccatgtgaggagctgagaacggaagctgcagaaagatacgactgaggcgcctacctgcattctgccacccctcacacagccaaaccccagatcatctgaaactactaactttgtggttccagattttttttaatctcctacttctgctatctttgagcaatctgggcacttttaaaaatagagaaatgagtgaatgtgggtgatctgcttttatctaaatgcaaataaggatgtgttctctgagacccatgatcaggggatgtggcggggggtggctagagggagaaaaaggaaatgtcttgtgttgttttgttcccctgccctcctttctcagcagctttttgttattgttgttgttgttcttagacaagtgcctcctggtgcctgcggcatccttctgcctgtttctgtaagcaaatgccacaggccacctatagctacatactcctggcattgcactttttaaccttgctgacatccaaatagaagataggactatctaagccctaggtttctttttaaattaagaaataataacaattaaagggcaaaaaacactgtatcagcatagcctttctgtatttaagaaacttaagcagccgggcatggtggctcacgcctgtaatcccagcactttgggaggccgaggcggatcataaggtcaggagatcaagaccatcctggctaacacggtgaaaccccgtctctactaaaagtacaaaaaattagctgggtgtggtggtgggcgcctgtagtcccagctactcgggaggctgaggcaggagaatcgcttgaacctgagaggcggaggttgcagtgagccaaaattgcaccactgcacactgcactccatcctgggcgacagtctgagactctgtctcaaaaaaaaaaaaaaaaaaaagaaacttcagttaacagcctccttggtgctttaagcattcagcttccttcaggctggtaatttatataatccctgaaacgggcttcaggtcaaacccttaagacatctgaagctgcaacctggcctttggtgttgaaataggaaggtttaaggagaatctaagcattttagacttttttttataaatagacttattttcctttgtaatgtattggccttttagtgagtaaggctgggcagagggtgcttacaaccttgactccctttctccctggacttgatctgctgtttcagaggctaggttgtttctgtgggtgccttatcagggctgggatacttctgattctggcttccttcctgccccaccctcccgaccccagtccccctgatcctgctagaggcatgtctccttgcgtgtctaaaggtccctcatcctgtttgttttaggaatcctggtctcaggacctcatggaagaagagggggagagagttacaggttggacatgatgcacactatggggccccagcgacgtgtctggttgagctcagggaatatggttcttagccagtttcttggtgatatccagtggcacttgtaatggcgtcttcattcagttcatgcagggcaaaggcttactgataaacttgagtctgccctcgtatgagggtgtatacctggcctccctctgaggctggtgactcctccctgctggggccccacaggtgaggcagaacagctagagggcctccccgcctgcccgccttggctggctagctcgcctctcctgtgcgtatgggaacacctagcacgtgctggatgggctgcctctgactcagaggcatggccggatttggcaactcaaaaccaccttgcctcagctgatcagagtttctgtggaattctgtttgttaaatcaaattagctggtctctgaattaagggggagacgaccttctctaagatgaacagggttcgccccagtcctcctgcctggagacagttgatgtgtcatgcagagctcttacttctccagcaacactcttcagtacataataagcttaactgataaacagaatatttagaaaggtgagacttgggcttaccattgggtttaaatcatagggacctagggcgagggttcagggcttctctggagcagatattgtcaagttcatggccttaggtagcatgtatctggtcttaactctgattgtagcaaaagttctgagaggagctgagccctgttgtggcccattaaagaacagggtcctcaggccctgcccgcttcctgtccactgccccctccccatccccagcccagccgagggaatcccgtgggttgcttacctacctataaggtggtttataagctgctgtcctggccactgcattcaaattccaatgtgtacttcatagtgtaaaaatttatattattgtgaggttttttgtcttttttttttttttttttttttggtatattgctgtatctactttaacttccagaaataaacgttatataggaaccgtc

SEQ ID NO: 41 - protein, 84 aa, Artificial Sequence
  Synthetic
MTNLSDIIEKETGKQLVIQESILMLPEEVEEVIGNKPESDILVHTAYDESTDENVMLLTSDAPEYKPWALVIQDSNGENKIKML

SEQ ID NO: 42 - DNA, 40 bp, Artificial Sequence
  Synthetic
gcccgggtttcctctctgcaggtgctgccccgtacctgaa

SEQ ID NO: 43 - protein, 14 aa, Artificial Sequence
  Synthetic
SPGFLSAGAAPYLK

SEQ ID NO: 44 - DNA, 40 bp, Artificial Sequence
  Synthetic
ttcaggtacggggcagcacctgcagagaggaaacccgggc

SEQ ID NO: 45 - DNA, 40 bp, Artificial Sequence
  Synthetic
gcccgggtttcctctctgcaggtgctgccccgcacctgaa

SEQ ID NO: 46 - DNA, 40 bp, Artificial Sequence
  Synthetic
gcccgggtttcctctctgcaggcgctgccccgtacctgaa

SEQ ID NO: 47 - DNA, 37 bp, Artificial Sequence
  Synthetic
ctctgcaggtgctgccccgtacctgaagaccaagttc

SEQ ID NO: 48 - protein, 12 aa, Artificial Sequence
  Synthetic
SAGAAPYLKTKF

SEQ ID NO: 49 - DNA, 37 bp, Artificial Sequence
  Synthetic
gaacttggtcttcaggtacggggcagcacctgcagag

SEQ ID NO: 50 - DNA, 37 bp, Artificial Sequence
  Synthetic
accattgacctgccgatgtccccccgcactttagatt

SEQ ID NO: 51 - protein, 12 aa, Artificial Sequence
  Synthetic
TIDLPMSPRTLD

SEQ ID NO: 52 - DNA, 37 bp, Artificial Sequence
  Synthetic
aatctaaagtgcggggggacatcggcaggtcaatggt

SEQ ID NO: 53 - DNA, 52 bp, Artificial Sequence
  Synthetic
tttcttcttcccaggcgctgccccatacctgaagaccaagtttatctgtgtg

SEQ ID NO: 54 - protein, 17 aa, Artificial Sequence
  Synthetic
FFFPGAAPYLKTKFICV

SEQ ID NO: 55 - DNA, 52 bp, Artificial Sequence
  Synthetic
cacacagataaacttggtcttcaggtatggggcagcgcctgggaagaagaaa

SEQ ID NO: 56 - DNA, 40 bp, Artificial Sequence
  Synthetic
aactggttttcttcttcccaggcgctgccccatacctgaa

SEQ ID NO: 57 - DNA, 40 bp, Artificial Sequence
  Synthetic
aactggttttcttcttcccaggcgctgccccacacctgaa

SEQ ID NO: 58 - DNA, 40 bp, Artificial Sequence
  Synthetic
aactggttttcttcttcccaggcgctgccccacacccgaa

SEQ ID NO: 59 - protein, 1367 aa, Artificial Sequence
  Synthetic
DKKYSIGLDIGTNSVGWAVITDEYKVPSKKFKVLGNTDRHSIKKNLIGALLFDSGETAEATRLKRTARRRYTRRKNRICYLQEIFSNEMAKVDDSFFHRLEESFLVEEDKKHERHPIFGNIVDEVAYHEKYPTIYHLRKKLVDSTDKADLRLIYLALAHMIKFRGHFLIEGDLNPDNSDVDKLFIQLVQTYNQLFEENPINASGVDAKAILSARLSKSRRLENLIAQLPGEKKNGLFGNLIALSLGLTPNFKSNFDLAEDAKLQLSKDTYDDDLDNLLAQIGDQYADLFLAAKNLSDAILLSDILRVNTEITKAPLSASMIKRYDEHHQDLTLLKALVRQQLPEKYKEIFFDQSKNGYAGYIDGGASQEEFYKFIKPILEKMDGTEELLVKLNREDLLRKQRTFDNGSIPHQIHLGELHAILRRQEDFYPFLKDNREKIEKILTFRIPYYVGPLARGNSRFAWMTRKSEETITPWNFEEVVDKGASAQSFIERMTNFDKNLPNEKVLPKHSLLYEYFTVYNELTKVKYVTEGMRKPAFLSGEQKKAIVDLLFKTNRKVTVKQLKEDYFKKIECFDSVEISGVEDRFNASLGTYHDLLKIIKDKDFLDNEENEDILEDIVLTLTLFEDREMIEERLKTYAHLFDDKVMKQLKRRRYTGWGRLSRKLINGIRDKQSGKTILDFLKSDGFANRNFMQLIHDDSLTFKEDIQKAQVSGQGDSLHEHIANLAGSPAIKKGILQTVKVVDELVKVMGRHKPENIVIEMARENQTTQKGQKNSRERMKRIEEGIKELGSQILKEHPVENTQLQNEKLYLYYLQNGRDMYVDQELDINRLSDYDVDAIVPQSFLKDDSIDNKVLTRSDKNRGKSDNVPSEEVVKKMKNYWRQLLNAKLITQRKFDNLTKAERGGLSELDKAGFIKRQLVETRQITKHVAQILDSRMNTKYDENDKLIREVKVITLKSKLVSDFRKDFQFYKVREINNYHHAHDAYLNAVVGTALIKKYPKLESEFVYGDYKVYDVRKMIAKSEQEIGKATAKYFFYSNIMNFFKTEITLANGEIRKRPLIETNGETGEIVWDKGRDFATVRKVLSMPQVNIVKKTEVQTGGFSKESILPKRNSDKLIARKKDWDPKKYGGFVSPTVAYSVLVVAKVEKGKSKKLKSVKELLGITIMERSSFEKNPIDFLEAKGYKEVKKDLIIKLPKYSLFELENGRKRMLASAGELQKGNELALPSKYVNFLYLASHYEKLKGSPEDNEQKQLFVEQHKHYLDEIIEQISEFSKRVILADANLDKVLSAYNKHRDKPIREQAENIIHLFTLTNLGAPAAFKYFDTTIDRKQYRSTKEVLDATLIHQSITGLYETRIDLSQLGGD

SEQ ID NO: 60 - protein, 1368 aa, Artificial Sequence
  Synthetic
MDKKYSIGLDIGTNSVGWAVITDEYKVPSKKFKVLGNTDRHSIKKNLIGALLFDSGETAEATRLKRTARRRYTRRKNRICYLQEIFSNEMAKVDDSFFHRLEESFLVEEDKKHERHPIFGNIVDEVAYHEKYPTIYHLRKKLVDSTDKADLRLIYLALAHMIKFRGHFLIEGDLNPDNSDVDKLFIQLVQTYNQLFEENPINASGVDAKAILSARLSKSRRLENLIAQLPGEKKNGLFGNLIALSLGLTPNFKSNFDLAEDAKLQLSKDTYDDDLDNLLAQIGDQYADLFLAAKNLSDAILLSDILRVNTEITKAPLSASMIKRYDEHHQDLTLLKALVRQQLPEKYKEIFFDQSKNGYAGYIDGGASQEEFYKFIKPILEKMDGTEELLVKLNREDLLRKQRTFDNGSIPHQIHLGELHAILRRQEDFYPFLKDNREKIEKILTFRIPYYVGPLARGNSRFAWMTRKSEETITPWNFEEVVDKGASAQSFIERMTNFDKNLPNEKVLPKHSLLYEYFTVYNELTKVKYVTEGMRKPAFLSGEQKKAIVDLLFKTNRKVTVKQLKEDYFKKIECFDSVEISGVEDRFNASLGTYHDLLKIIKDKDFLDNEENEDILEDIVLTLTLFEDREMIEERLKTYAHLFDDKVMKQLKRRRYTGWGRLSRKLINGIRDKQSGKTILDFLKSDGFANRNFMQLIHDDSLTFKEDIQKAQVSGQGDSLHEHIANLAGSPAIKKGILQTVKVVDELVKVMGRHKPENIVIEMARENQTTQKGQKNSRERMKRIEEGIKELGSQILKEHPVENTQLQNEKLYLYYLQNGRDMYVDQELDINRLSDYDVDHIVPQSFLKDDSIDNKVLTRSDKNRGKSDNVPSEEVVKKMKNYWRQLLNAKLITQRKFDNLTKAERGGLSELDKAGFIKRQLVETRQITKHVAQILDSRMNTKYDENDKLIREVKVITLKSKLVSDFRKDFQFYKVREINNYHHAHDAYLNAVVGTALIKKYPKLESEFVYGDYKVYDVRKMIAKSEQEIGKATAKYFFYSNIMNFFKTEITLANGEIRKRPLIETNGETGEIVWDKGRDFATVRKVLSMPQVNIVKKTEVQTGGFSKESIRPKRNSDKLIARKKDWDPKKYGGFVSPTVAYSVLVVAKVEKGKSKKLKSVKELLGITIMERSSFEKNPIDFLEAKGYKEVKKDLIIKLPKYSLFELENGRKRMLASARFLQKGNELALPSKYVNFLYLASHYEKLKGSPEDNEQKQLFVEQHKHYLDEIIEQISEFSKRVILADANLDKVLSAYNKHRDKPIREQAENIIHLFTLTNLGAPRAFKYFDTTIDRKVYRSTKEVLDATLIHQSITGLYETRIDLSQLGGD

SEQ ID NO: 61 - protein, 167 aa, Escherichia coli
MSEVEFSHEYWMRHALTLAKRARDEREVPVGAVLVLNNRVIGEGWNRAIGLHDPTAHAEIMALRQGGLVMQNYRLIDATLYVTFEPCVMCAGAMIHSRIGRVVFGVRNAKTGAAGSLMDVLHYPGMNHRVEITEGILADECAALLCYFFRMPRQVFNAQKKAQSSTD

SEQ ID NO: 62 - DNA, 498 bp, Escherichia coli
tctgaggtggagttttcccacgagtactggatgagacatgccctgaccctggccaagagggcacgcgatgagagggaggtgcctgtgggagccgtgctggtgctgaacaatagagtgatcggcgagggctggaacagagccatcggcctgcacgacccaacagcccatgccgaaattatggccctgagacagggcggcctggtcatgcagaactacagactgattgacgccaccctgtacgtgacattcgagccttgcgtgatgtgcgccggcgccatgatccactctaggatcggccgcgtggtgtttggcgtgaggaacgcaaaaaccggcgccgcaggctccctgatggacgtgctgcactaccccggcatgaatcaccgcgtcgaaattaccgagggaatcctggcagatgaatgtgccgccctgctgtgctatttctttcggatgcctagacaggtgttcaatgctcagaagaaggcccagagctccaccgac

SEQ ID NO: 63 - RNA, 81 nt, Artificial Sequence
  Synthetic
guuuuagagcuagaaauagcaaguuaaaauaaggcuaguccguuaucaacuugaaaaaguggcaccgagucggugcuuuuu

SEQ ID NO: 64 - RNA, 91 nt, Artificial Sequence
  Synthetic
guuuuaguacucuguaaugaaaauuacagaaucuacuaaaacaaggcaaaaugccguguuuaucucgucaacuuguuggcgagauuuuuuu

SEQ ID NO: 65 - RNA, 21 nt, Artificial Sequence
  Synthetic
uaauuucuacuaaguguagau

SEQ ID NO: 66 - RNA, 20 nt, Artificial Sequence
  Synthetic
uaauuucuacucuuguagau

SEQ ID NO: 67 - protein, 36 aa, Artificial Sequence
  Synthetic
  misc_feature (2)..(2): Xaa can be any naturally occurring amino acid
  misc_feature (3)..(29): Xaa can be any naturally occurring amino acid
  misc_feature (26)..(29): may be absent
  misc_feature (32)..(35): Xaa can be any naturally occurring amino acid
  misc_feature (34)..(35): may be absent
  misc_feature (36)..(36): Xaa can be any naturally occurring amino acid
HXGXXXXXXXXXXXXXXXXXXXXXXXXXXPCXXXXC

SEQ ID NO: 68-69 - skipped (2 entries)

SEQ ID NO: 70 - protein, 30 aa, Artificial Sequence
  Synthetic
MDSLLMNRRKFLYQFKNVRWAKGRRETYLC

SEQ ID NO: 71 - protein, 167 aa, Escherichia coli
MSEVEFSHEYWMRHALTLAKRARDEREVPVGAVLVLNNRVIGEGWNRAIGLHDPTAHAEIMALRQGGLVMQNYRLIDATLYVTFEPCVMCAGAMIHSRIGRVVFGWRNAKTGAAGSLMDVLHYPGMNHRVEITEGILADECAALLCYFFRMPRQVFNAQKKAQSSTD

SEQ ID NO: 72 - DNA, 498 bp, Escherichia coli
tctgaggtggagttttcccacgagtactggatgagacatgccctgaccctggccaagagggcacgggatgagagggaggtgcctgtgggagccgtgctggtgctgaacaatagagtgatcggcgagggctggaacagagccatcggcctgcacgacccaacagcccatgccgaaattatggccctgagacagggcggcctggtcatgcagaactacagactgattgacgccaccctgtacgtgacattcgagccttgcgtgatgtgcgccggcgccatgatccactctaggatcggccgcgtggtgtttggcgtgaggaactcaaaaagaggcgccgcaggctccctgatgaacgtgctgaactaccccggcatgaatcaccgcgtcgaaattaccgagggaatcctggcagatgaatgtgccgccctgctgtgcgatttctatcggatgcctagacaggtgttcaatgctcagaagaaggcccagagctccatcaac

SEQ ID NO: 73 - protein, 166 aa, Escherichia coli
SEVEFSHEYWMRHALTLAKRARDEREVPVGAVLVLNNRVIGEGWNRAIGLHDPTAHAEIMALRQGGLVMQNYRLIDATLYVTFEPCVMCAGAMIHSRIGRVVFGVRNSKRGAAGSLMNVLNYPGMNHRVEITEGILADECAALLCDFYRMPRQVFNAQKKAQSSIN

SEQ ID NO: 74 - protein, 1368 aa, Streptococcus pyogenes [sequence omitted]

SEQ ID NO: 75 - DNA, 4104 bp, Streptococcus pyogenes
atggataaaaaatatagcattggcctggatattggcaccaacagcgtgggctgggcggtgattaccgatgaatataaagtgccgagcaaaaaatttaaagtgctgggcaacaccgatcgccatagcattaaaaaaaacctgattggcgcgctgctgtttgatagcggcgaaaccgcggaagcgacccgcctgaaacgcaccgcgcgccgccgctatacccgccgcaaaaaccgcatttgctatctgcaggaaatttttagcaacgaaatggcgaaagtggatgatagcttttttcatcgcctggaagaaagctttctggtggaagaagataaaaaacatgaacgccatccgatttttggcaacattgtggatgaagtggcgtatcatgaaaaatatccgaccatttatcatctgcgcaaaaaactggtggatagcaccgataaagcggatctgcgcctgatttatctggcgctggcgcatatgattaaatttcgcggccattttctgattgaaggcgatctgaacccggataacagcgatgtggataaactgtttattcagctggtgcagacctataaccagctgtttgaagaaaacccgattaacgcgagcggcgtggatgcgaaagcgattctgagcgcgcgcctgagcaaaagccgccgcctggaaaacctgattgcgcagctgccgggcgaaaaaaaaaacggcctgtttggcaacctgattgcgctgagcctgggcctgaccccgaactttaaaagcaactttgatctggcggaagatgcgaaactgcagctgagcaaagatacctatgatgatgatctggataacctgctggcgcagattggcgatcagtatgcggatctgtttctggcggcgaaaaacctgagcgatgcgattctgctgagcgatattctgcgcgtgaacaccgaaattaccaaagcgccgctgagcgcgagcatgattaaacgctatgatgaacatcatcaggatctgaccctgctgaaagcgctggtgcgccagcagctgccggaaaaatataaagaaattttttttgatcagagcaaaaacggctatgcgggctatattgatggcggcgcgagccaggaagaattttataaatttattaaaccgattctggaaaaaatggatggcaccgaagaactgctggtgaaactgaaccgcgaagatctgctgcgcaaacagcgcacctttgataacggcagcattccgcatcagattcatctgggcgaactgcatgcgattctgcgccgccaggaagatttttatccgtttctgaaagataaccgcgaaaaaattgaaaaaattctgacctttcgcattccgtattatgtgggcccgctggcgcgcggcaacagccgctttgcgtggatgacccgcaaaagcgaagaaaccattaccccgtggaactttgaagaagtggtggataaaggcgcgagcgcgcagagctttattgaacgcatgaccaactttgataaaaacctgccgaacgaaaaagtgctgccgaaacatagcctgctgtatgaatattttaccgtgtataacgaactgaccaaagtgaaatatgtgaccgaaggcatgcgcaaaccggcgtttctgagcggcgaacagaaaaaagcgattgtggatctgctgtttaaaaccaaccgcaaagtgaccgtgaaacagctgaaagaagattattttaaaaaaattgaatgctttgatagcgtggaaattagcggcgtggaagatcgctttaacgcgagcctgggcacctatcatgatctgctgaaaattattaaagataaagattttctggataacgaagaaaacgaagatattctggaagatattgtgctgaccctgaccctgtttgaagatcgcgaaatgattgaagaacgcctgaaaacctatgcgcatctgtttgatgataaagtgatgaaacagctgaaacgccgccgctataccggctggggccgcctgagccgcaaactgattaacggcattcgcgataaacagagcggcaaaaccattctggattttctgaaaagcgatggctttgcgaaccgcaactttatgcagctgattcatgatgatagcctgacctttaaagaagatattcagaaagcgcaggtgagcggccagggcgatagcctgcatgaacatattgcgaacctggcgggcagcccggcgattaaaaaaggcattctgcagaccgtgaaagtggtggatgaactggtgaaagtgatgggccgccataaaccggaaaacattgtgattgaaatggcgcgcgaaaaccagaccacccagaaaggccagaaaaacagccgcgaacgcatgaaacgcattgaagaaggcattaaagaactgggcagccagattctgaaagaacatccggtggaaaacacccagctgcagaacgaaaaactgtatctgtattatctgcagaacggccgcgatatgtatgtggatcaggaactggatattaaccgcctgagcgattatgatgtggatcatattgtgccgcagagctttctgaaagatgatagcattgataacaaagtgctgacccgcagcgataaaaaccgcggcaaaagcgataacgtgccgagcgaagaagtggtgaaaaaaatgaaaaactattggcgccagctgctgaacgcgaaactgattacccagcgcaaatttgataacctgaccaaagcggaacgcggcggcctgagcgaactggataaagcgggctttattaaacgccagctggtggaaacccgccagattaccaaacatgtggcgcagattctggatagccgcatgaacaccaaatatgatgaaaacgataaactgattcgcgaagtgaaagtgattaccctgaaaagcaaactggtgagcgattttcgcaaagattttcagttttataaagtgcgcgaaattaacaactatcatcatgcgcatgatgcgtatctgaacgcggtggtgggcaccgcgctgattaaaaaatatccgaaactggaaagcgaatttgtgtatggcgattataaagtgtatgatgtgcgcaaaatgattgcgaaaagcgaacaggaaattggcaaagcgaccgcgaaatattttttttatagcaacattatgaacttttttaaaaccgaaattaccctggcgaacggcgaaattcgcaaacgcccgctgattgaaaccaacggcgaaaccggcgaaattgtgtgggataaaggccgcgattttgcgaccgtgcgcaaagtgctgagcatgccgcaggtgaacattgtgaaaaaaaccgaagtgcagaccggcggctttagcaaagaaagcattctgccgaaacgcaacagcgataaactgattgcgcgcaaaaaagattgggatccgaaaaaatatggcggctttgatagcccgaccgtggcgtatagcgtgctggtggtggcgaaagtggaaaaaggcaaaagcaaaaaactgaaaagcgtgaaagaactgctgggcattaccattatggaacgcagcagctttgaaaaaaacccgattgattttctggaagcgaaaggctataaagaagtgaaaaaagatctgattattaaactgccgaaatatagcctgtttgaactggaaaacggccgcaaacgcatgctggcgagcgcgggcgaactgcagaaaggcaacgaactggcgctgccgagcaaatatgtgaactttctgtatctggcgagccattatgaaaaactgaaaggcagcccggaagataacgaacagaaacagctgtttgtggaacagcataaacattatctggatgaaattattgaacagattagcgaatttagcaaacgcgtgattctggcggatgcgaacctggataaagtgctgagcgcgtataacaaacatcgcgataaaccgattcgcgaacaggcggaaaacattattcatctgtttaccctgaccaacctgggcgcgccggcggcgtttaaatattttgataccaccattgatcgcaaacgctataccagcaccaaagaagtgctggatgcgaccctgattcatcagagcattaccggcctgtatgaaacccgcattgatctgagccagctgggcggcgat

SEQ ID NO: 76 - DNA, 4104 bp, Streptococcus pyogenes
atggataagaaatactcaataggcttagatatcggcacaaatagcgtcggatgggcggtgatcactgatgattataaggttccgtctaaaaagttcaaggttctgggaaatacagaccgccacagtatcaaaaaaaatcttataggggctcttttatttggcagtggagagacagcggaagcgactcgtctcaaacggacagctcgtagaaggtatacacgtcggaagaatcgtatttgttatctacaggagattttttcaaatgagatggcgaaagtagatgatagtttctttcatcgacttgaagagtcttttttggtggaagaagacaagaagcatgaacgtcatcctatttttggaaatatagtagatgaagttgcttatcatgagaaatatccaactatctatcatctgcgaaaaaaattggcagattctactgataaagcggatttgcgcttaatctatttggccttagcgcatatgattaagtttcgtggtcattttttgattgagggagatttaaatcctgataatagtgatgtggacaaactatttatccagttggtacaaatctacaatcaattatttgaagaaaaccctattaacgcaagtagagtagatgctaaagcgattctttctgcacgattgagtaaatcaagacgattagaaaatctcattgctcagctccccggtgagaagagaaatggcttgtttgggaatctcattgctttgtcattgggattgacccctaattttaaatcaaattttgatttggcagaagatgctaaattacagctttcaaaagatacttacgatgatgatttagataatttattggcgcaaattggagatcaatatgctgatttgtttttggcagctaagaatttatcagatgctattttactttcagatatcctaagagtaaatagtgaaataactaaggctcccctatcagcttcaatgattaagcgctacgatgaacatcatcaagacttgactcttttaaaagctttagttcgacaacaacttccagaaaagtataaagaaatcttttttgatcaatcaaaaaacggatatgcaggttatattgatgggggagctagccaagaagaattttataaatttatcaaaccaattttagaaaaaatggatggtactgaggaattattggtgaaactaaatcgtgaagatttgctgcgcaagcaacggacctttgacaacggctctattccccatcaaattcacttgggtgagctgcatgctattttgagaagacaagaagacttttatccatttttaaaagacaatcgtgagaagattgaaaaaatcttgacttttcgaattccttattatgttggtccattggcgcgtggcaatagtcgttttgcatggatgactcggaagtctgaagaaacaattaccccatggaattttgaagaagttgtcgataaaggtgcttcagctcaatcatttattgaacgcatgacaaactttgataaaaatcttccaaatgaaaaagtactaccaaaacatagtttgctttatgagtattttacggtttataacgaattgacaaaggtcaaatatgttactgagggaatgcgaaaaccagcatttctttcaggtgaacagaagaaagccattgttgatttactcttcaaaacaaatcgaaaagtaaccgttaagcaattaaaagaagattatttcaaaaaaatagaatgttttgatagtgttgaaatttcaggagttgaagatagatttaatgcttcattaggcgcctaccatgatttgctaaaaattattaaagataaagattttttggataatgaagaaaatgaagatatcttagaggatattgttttaacattgaccttatttgaagatagggggatgattgaggaaagacttaaaacatatgctcacctctttgatgataaggtgatgaaacagcttaaacgtcgccgttatactggttggggacgtttgtctcgaaaattgattaatggtattagggataagcaatctggcaaaacaatattagattttttgaaatcagatggttttgccaatcgcaattttatgcagctgatccatgatgatagtttgacatttaaagaagatattcaaaaagcacaggtgtctggacaaggccatagtttacatgaacagattgctaacttagctggcagtcctgctattaaaaaaggtattttacagactgtaaaaattgttgatgaactggtcaaagtaatggggcataagccagaaaatatcgttattgaaatggcacgtgaaaatcagacaactcaaaagggccagaaaaattcgcgagagcgtatgaaacgaatcgaagaaggtatcaaagaattaggaagtcagattcttaaagagcatcctgttgaaaatactcaattgcaaaatgaaaagctctatctctattatctacaaaatggaagagacatgtatgtggaccaagaattagatattaatcgtttaagtgattatgatgtcgatcacattgttccacaaagtttcattaaagacgattcaatagacaataaggtactaacgcgttctgataaaaatcgtggtaaatcggataacgttccaagtgaagaagtagtcaaaaagatgaaaaactattggagacaacttctaaacgccaagttaatcactcaacgtaagtttgataatttaacgaaagctgaacgtggaggtttgagtgaacttgataaagctggttttatcaaacgccaattggttgaaactcgccaaatcactaagcatgtggcacaaattttggatagtcgcatgaatactaaatacgatgaaaatgataaacttattcgagaggttaaagtgattaccttaaaatctaaattagtttctgacttccgaaaagatttccaattctataaagtacgtgagattaacaattaccatcatgcccatgatgcgtatctaaatgccgtcgttggaactgctttgattaagaaatatccaaaacttgaatcggagtttgtctatggtgattataaagtttatgatgttcgtaaaatgattgctaagtctgagcaagaaataggcaaagcaaccgcaaaatatttcttttactctaatatcatgaacttcttcaaaacagaaattacacttgcaaatggagagattcgcaaacgccctctaatcgaaactaatggggaaactggagaaattgtctgggataaagggcgagattttgccacagtgcgcaaagtattgtccatgccccaagtcaatattgtcaagaaaacagaagtacagacaggcggattctccaaggagtcaattttaccaaaaagaaattcggacaagcttattgctcgtaaaaaagactgggatccaaaaaaatatggtggttttgatagtccaacggtagcttattcagtcctagtggttgctaaggtggaaaaagggaaatcgaagaagttaaaatccgttaaagagttactagggatcacaattatggaaagaagttcctttgaaaaaaatccgattgactttttagaagctaaaggatataaggaagttaaaaaagacttaatcattaaactacctaaatatagtctttttgagttagaaaacggtcgtaaacggatgctggctagtgccggagaattacaaaaaggaaatgagctggctctgccaagcaaatatgtgaattttttatatttagctagtcattatgaaaagttgaagggtagtccagaagataacgaacaaaaacaattgtttgtggagcagcataagcattatttagatgagattattgagcaaatcagtgaattttctaagcgtgttattttagcagatgccaatttagataaagttcttagtgcatataacaaacatagagacaaaccaatacgtgaacaagcagaaaatattattcatttatttacgttgacgaatcttggagctcccgctgcttttaaatattttgatacaacaattgatcgtaaacgatatacgtctacaaaagaagttttagatgccactcttatccatcaatccatcactggtctttatgaaacacgcattgatttgagtcagctaggaggtgactga

SEQ ID NO: 77 - protein, 1367 aa, Streptococcus pyogenes
MDKKYSIGLDIGTNSVGWAVITDDYKVPSKKFKVLGNTDRHSIKKNLIGALLFGSGETAEATRLKRTARRRYTRRKNRICYLQEIFSNEMAKVDDSFFHRLEESFLVEEDKKHERHPIFGNIVDEVAYHEKYPTIYHLRKKLADSTDKADLRLIYLALAHMIKFRGHFLIEGDLNPDNSDVDKLFIQLVQIYNQLFEENPINASRVDAKAILSARLSKSRRLENLIAQLPGEKRNGLFGNLIALSLGLTPNFKSNFDLAEDAKLQLSKDTYDDDLDNLLAQIGDQYADLFLAAKNLSDAILLSDILRVNSEITKAPLSASMIKRYDEHHQDLTLLKALVRQQLPEKYKEIFFDQSKNGYAGYIDGGASQEEFYKFIKPILEKMDGTEELLVKLNREDLLRKQRTFDNGSIPHQIHLGELHAILRRQEDFYPFLKDNREKIEKILTFRIPYYVGPLARGNSRFAWMTRKSEETITPWNFEEVVDKGASAQSFIERMTNFDKNLPNEKVLPKHSLLYEYFTVYNELTKVKYVTEGMRKPAFLSGEQKKAIVDLLFKTNRKVTVKQLKEDYFKKIECFDSVEISGVEDRFNASLGAYHDLLKIIKDKDFLDNEENEDILEDIVLTLTLFEDRGMIEERLKTYAHLFDDKVMKQLKRRRYTGWGRLSRKLINGIRDKQSGKTILDFLKSDGFANRNFMQLIHDDSLTFKEDIQKAQVSGQGHSLHEQIANLAGSPAIKKGILQTVKIVDELVKVMGHKPENIVIEMARENQTTQKGQKNSRERMKRIEEGIKELGSQILKEHPVENTQLQNEKLYLYYLQNGRDMYVDQELDINRLSDYDVDHIVPQSFIKDDSIDNKVLTRSDKNRGKSDNVPSEEVVKKMKNYWRQLLNAKLITQRKFDNLTKAERGGLSELDKAGFIKRQLVETRQITKHVAQILDSRMNTKYDENDKLIREVKVITLKSKLVSDFRKDFQFYKVREINNYHHAHDAYLNAVVGTALIKKYPKLESEFVYGDYKVYDVRKMIAKSEQEIGKATAKYFFYSNIMNFFKTEITLANGEIRKRPLIETNGETGEIVWDKGRDFATVRKVLSMPQVNIVKKTEVQTGGFSKESILPKRNSDKLIARKKDWDPKKYGGFDSPTVAYSVLVVAKVEKGKSKKLKSVKELLGITIMERSSFEKNPIDFLEAKGYKEVKKDLIIKLPKYSLFELENGRKRMLASAGELQKGNELALPSKYVNFLYLASHYEKLKGSPEDNEQKQLFVEQHKHYLDEIIEQISEFSKRVILADANLDKVLSAYNKHRDKPIREQAENIIHLFTLTNLGAPAAFKYFDTTIDRKRYTSTKEVLDATLIHQSITGLYETRIDLSQLGGD

SEQ ID NO: 78 - DNA, 4212 bp, Streptococcus pyogenes
atggataaaaagtattctattggtttagacatcggcactaattccgttggatgggctgtcataaccgatgaatacaaagtaccttcaaagaaatttaaggtgttggggaacacagaccgtcattcgattaaaaagaatcttatcggtgccctcctattcgatagtggcgaaacggcagaggcgactcgcctgaaacgaaccgctcggagaaggtatacacgtcgcaagaaccgaatatgttacttacaagaaatttttagcaatgagatggccaaagttgacgattctttctttcaccgtttggaagagtccttccttgtcgaagaggacaagaaacatgaacggcaccccatctttggaaacatagtagatgaggtggcatatcatgaaaagtacccaacgatttatcacctcagaaaaaagctagttgactcaactgataaagcggacctgaggttaatctacttggctcttgcccatatgataaagttccgtgggcactttctcattgagggtgatctaaatccggacaactcggatgtcgacaaactgttcatccagttagtacaaacctataatcagttgtttgaagagaaccctataaatgcaagtggcgtggatgcgaaggctattcttagcgcccgcctctctaaatcccgacggctagaaaacctgatcgcacaattacccggagagaagaaaaatgggttgttcggtaaccttatagcgctctcactaggcctgacaccaaattttaagtcgaacttcgacttagctgaagatgccaaattgcagcttagtaaggacacgtacgatgacgatctcgacaatctactggcacaaattggagatcagtatgcggacttatttttggctgccaaaaaccttagcgatgcaatcctcctatctgacatactgagagttaatactgagattaccaaggcgccgttatccgcttcaatgatcaaaaggtacgatgaacatcaccaagacttgacacttctcaaggccctagtccgtcagcaactgcctgagaaatataaggaaatattctttgatcagtcgaaaaacgggtacgcaggttatattgacggcggagcgagtcaagaggaattctacaagtttatcaaacccatattagagaagatggatgggacggaagagttgcttgtaaaactcaatcgcgaagatctactgcgaaagcagcggactttcgacaacggtagcattccacatcaaatccacttaggcgaattgcatgctatacttagaaggcaggaggatttttatccgttcctcaaagacaatcgtgaaaagattgagaaaatcctaacctttcgcataccttactatgtgggacccctggcccgagggaactctcggttcgcatggatgacaagaaagtccgaagaaacgattactccatggaattttgaggaagttgtcgataaaggtgcgtcagctcaatcgttcatcgagaggatgaccaactttgacaagaatttaccgaacgaaaaagtattgcctaagcacagtttactttacgagtatttcacagtgtacaatgaactcacgaaagttaagtatgtcactgagggcatgcgtaaacccgcctttctaagcggagaacagaagaaagcaatagtagatctgttattcaagaccaaccgcaaagtgacagttaagcaattgaaagaggactactttaagaaaattgaatgcttcgattctgtcgagatctccggggtagaagatcgatttaatgcgtcacttggtacgtatcatgacctcctaaagataattaaagataaggacttcctggataacgaagagaatgaagatatcttagaagatatagtgttgactcttaccctctttgaagatcgggaaatgattgaggaaagactaaaaacatacgctcacctgttcgacgataaggttatgaaacagttaaagaggcgtcgctatacgggctggggacgattgtcgcggaaacttatcaacgggataagagacaagcaaagtggtaaaactattctcgattttctaaagagcgacggcttcgccaataggaactttatgcagctgatccatgatgactctttaaccttcaaagaggatatacaaaaggcacaggtttccggacaaggggactcattgcacgaacatattgcgaatcttgctggttcgccagccatcaaaaagggcatactccagacagtcaaagtagtggatgagctagttaaggtcatgggacgtcacaaaccggaaaacattgtaatcgagatggcacgcgaaaatcaaacgactcagaaggggcaaaaaaacagtcgagagcggatgaagagaatagaagagggtattaaagaactgggcagccagatcttaaaggagcatcctgtggaaaatacccaattgcagaacgagaaactttacctctattacctacaaaatggaagggacatgtatgttgatcaggaactggacataaaccgtttatctgattacgacgtcgatcacattgtaccccaatcctttttgaaggacgattcaatcgacaataaagtgcttacacgctcggataagaaccgagggaaaagtgacaatgttccaagcgaggaagtcgtaaagaaaatgaagaactattggcggcagctcctaaatgcgaaactgataacgcaaagaaagttcgataacttaactaaagctgagaggggtggcttgtctgaacttgacaaggccggatttattaaacgtcagctcgtggaaacccgccaaatcacaaagcatgttgcacagatactagattcccgaatgaatacgaaatacgacgagaacgataagctgattcgggaagtcaaagtaatcactttaaagtcaaaattggtgtcggacttcagaaaggattttcaattctataaagttagggagataaataactaccaccatgcgcacgacgcttatcttaatgccgtcgtagggaccgcactcattaagaaatacccgaagctagaaagtgagtttgtgtatggtgattacaaagtttatgacgtccgtaagatgatcgcgaaaagcgaacaggagataggcaaggctacagccaaatacttcttttattctaacattatgaatttctttaagacggaaatcactctggcaaacggagagatacgcaaacgacctttaattgaaaccaatggggagacaggtgaaatcgtatgggataagggccgggacttcgcgacggtgagaaaagttttgtccatgccccaagtcaacatagtaaagaaaactgaggtgcagaccggagggttttcaaaggaatcgattcttccaaaaaggaatagtgataagctcatcgctcgtaaaaaggactgggacccgaaaaagtacggtggcttcgatagccctacagttgcctattctgtcctagtagtggcaaaagttgagaagggaaaatccaagaaactgaagtcagtcaaagaattattggggataacgattatggagcgctcgtcttttgaaaagaaccccatcgacttccttgaggcgaaaggttacaaggaagtaaaaaaggatctcataattaaactaccaaagtatagtctgtttgagttagaaaatggccgaaaacggatgttggctagcgccggagagcttcaaaaggggaacgaactcgcactaccgtctaaatacgtgaatttcctgtatttagcgtcccattacgagaagttgaaaggttcacctgaagataacgaacagaagcaactttttgttgagcagcacaaacattatctcgacgaaatcatagagcaaatttcggaattcagtaagagagtcatcctagctgatgccaatctggacaaagtattaagcgcatacaacaagcacagggataaacccatacgtgagcaggcggaaaatattatccatttgtttactcttaccaacctcggcgctccagccgcattcaagtattttgacacaacgatagatcgcaaacgatacacttctaccaaggaggtgctagacgcgacactgattcaccaatccatcacgggattatatgaaactcggatagatttgtcacagcttgggggtgacggatcccccaagaagaagaggaaagtctcgagcgactacaaagaccatgacggtgattataaagatcatgacatcgattacaaggatgacgatgacaaggctgcagga

SEQ ID NO: 79 - protein, 1404 aa, Streptococcus pyogenes
MDKKYSIGLDIGTNSVGWAVITDEYKVPSKKFKVLGNTDRHSIKKNLIGALLFDSGETAEATRLKRTARRRYTRRKNRICYLQEIFSNEMAKVDDSFFHRLEESFLVEEDKKHERHPIFGNIVDEVAYHEKYPTIYHLRKKLVDSTDKADLRLIYLALAHMIKFRGHFLIEGDLNPDNSDVDKLFIQLVQTYNQLFEENPINASGVDAKAILSARLSKSRRLENLIAQLPGEKKNGLFGNLIALSLGLTPNFKSNFDLAEDAKLQLSKDTYDDDLDNLLAQIGDQYADLFLAAKNLSDAILLSDILRVNTEITKAPLSASMIKRYDEHHQDLTLLKALVRQQLPEKYKEIFFDQSKNGYAGYIDGGASQEEFYKFIKPILEKMDGTEELLVKLNREDLLRKQRTFDNGSIPHQIHLGELHAILRRQEDFYPFLKDNREKIEKILTFRIPYYVGPLARGNSRFAWMTRKSEETITPWNFEEVVDKGASAQSFIERMTNFDKNLPNEKVLPKHSLLYEYFTVYNELTKVKYVTEGMRKPAFLSGEQKKAIVDLLFKTNRKVTVKQLKEDYFKKIECFDSVEISGVEDRFNASLGTYHDLLKIIKDKDFLDNEENEDILEDIVLTLTLFEDREMIEERLKTYAHLFDDKVMKQLKRRRYTGWGRLSRKLINGIRDKQSGKTILDFLKSDGFANRNFMQLIHDDSLTFKEDIQKAQVSGQGDSLHEHIANLAGSPAIKKGILQTVKVVDELVKVMGRHKPENIVIEMARENQTTQKGQKNSRERMKRIEEGIKELGSQILKEHPVENTQLQNEKLYLYYLQNGRDMYVDQELDINRLSDYDVDHIVPQSFLKDDSIDNKVLTRSDKNRGKSDNVPSEEVVKKMKNYWRQLLNAKLITQRKFDNLTKAERGGLSELDKAGFIKRQLVETRQITKHVAQILDSRMNTKYDENDKLIREVKVITLKSKLVSDFRKDFQFYKVREINNYHHAHDAYLNAVVGTALIKKYPKLESEFVYGDYKVYDVRKMIAKSEQEIGKATAKYFFYSNIMNFFKTEITLANGEIRKRPLIETNGETGEIVWDKGRDFATVRKVLSMPQVNIVKKTEVQTGGFSKESILPKRNSDKLIARKKDWDPKKYGGFDSPTVAYSVLVVAKVEKGKSKKLKSVKELLGITIMERSSFEKNPIDFLEAKGYKEVKKDLIIKLPKYSLFELENGRKRMLASAGELQKGNELALPSKYVNFLYLASHYEKLKGSPEDNEQKQLFVEQHKHYLDEIIEQISEFSKRVILADANLDKVLSAYNKHRDKPIREQAENIIHLFTLTNLGAPAAFKYFDTTIDRKRYTSTKEVLDATLIHQSITGLYETRIDLSQLGGDGSPKKKRKVSSDYKDHDGDYKDHDIDYKDDDDKAAG

SEQ ID NO: 80 - DNA, 4107 bp, Streptococcus pyogenes
atggataagaaatactcaataggcttagatatcggcacaaatagcgtcggatgggcggtgatcactgatgaatataaggttccgtctaaaaagttcaaggttctgggaaatacagaccgccacagtatcaaaaaaaatcttataggggctcttttatttgacagtggagagacagcggaagcgactcgtctcaaacggacagctcgtagaaggtatacacgtcggaagaatcgtatttgttatctacaggagattttttcaaatgagatggcgaaagtagatgatagtttctttcatcgacttgaagagtcttttttggtggaagaagacaagaagcatgaacgtcatcctatttttggaaatatagtagatgaagttgcttatcatgagaaatatccaactatctatcatctgcgaaaaaaattggtagattctactgataaagcggatttgcgcttaatctatttggccttagcgcatatgattaagtttcgtggtcattttttgattgagggagatttaaatcctgataatagtgatgtggacaaactatttatccagttggtacaaacctacaatcaattatttgaagaaaaccctattaacgcaagtggagtagatgctaaagcgattctttctgcacgattgagtaaatcaagacgattagaaaatctcattgctcagctccccggtgagaagaaaaatggcttatttgggaatctcattgctttgtcattgggtttgacccctaattttaaatcaaattttgatttggcagaagatgctaaattacagctttcaaaagatacttacgatgatgatttagataatttattggcgcaaattggagatcaatatgctgatttgtttttggcagctaagaatttatcagatgctattttactttcagatatcctaagagtaaatactgaaataactaaggctcccctatcagcttcaatgattaaacgctacgatgaacatcatcaagacttgactcttttaaaagctttagttcgacaacaacttccagaaaagtataaagaaatcttttttgatcaatcaaaaaacggatatgcaggttatattgatgggggagctagccaagaagaattttataaatttatcaaaccaattttagaaaaaatggatggtactgaggaattattggtgaaactaaatcgtgaagatttgctgcgcaagcaacggacctttgacaacggctctattccccatcaaattcacttgggtgagctgcatgctattttgagaagacaagaagacttttatccatttttaaaagacaatcgtgagaagattgaaaaaatcttgacttttcgaattccttattatgttggtccattggcgcgtggcaatagtcgttttgcatggatgactcggaagtctgaagaaacaattaccccatggaattttgaagaagttgtcgataaaggtgcttcagctcaatcatttattgaacgcatgacaaactttgataaaaatcttccaaatgaaaaagtactaccaaaacatagtttgctttatgagtattttacggtttataacgaattgacaaaggtcaaatatgttactgaaggaatgcgaaaaccagcatttctttcaggtgaacagaagaaagccattgttgatttactcttcaaaacaaatcgaaaagtaaccgttaagcaattaaaagaagattatttcaaaaaaatagaatgttttgatagtgttgaaatttcaggagttgaagatagatttaatgcttcattaggtacctaccatgatttgctaaaaattattaaagataaagattttttggataatgaagaaaatgaagatatcttagaggatattgttttaacattgaccttatttgaagatagggagatgattgaggaaagacttaaaacatatgctcacctctttgatgataaggtgatgaaacagcttaaacgtcgccgttatactggttggggacgtttgtctcgaaaattgattaatggtattagggataagcaatctggcaaaacaatattagattttttgaaatcagatggttttgccaatcgcaattttatgcagctgatccatgatgatagtttgacatttaaagaagacattcaaaaagcacaagtgtctggacaaggcgatagtttacatgaacatattgcaaatttagctggtagccctgctattaaaaaaggtattttacagactgtaaaagttgttgatgaattggtcaaagtaatggggcggcataagccagaaaatatcgttattgaaatggcacgtgaaaatcagacaactcaaaagggccagaaaaattcgcgagagcgtatgaaacgaatcgaagaaggtatcaaagaattaggaagtcagattcttaaagagcatcctgttgaaaatactcaattgcaaaatgaaaagctctatctctattatctccaaaatggaagagacatgtatgtggaccaagaattagatattaatcgtttaagtgattatgatgtcgatcacattgttccacaaagtttccttaaagacgattcaatagacaataaggtcttaacgcgttctgataaaaatcgtggtaaatcggataacgttccaagtgaagaagtagtcaaaaagatgaaaaactattggagacaacttctaaacgccaagttaatcactcaacgtaagtttgataatttaacgaaagctgaacgtggaggtttgagtgaacttgataaagctggttttatcaaacgccaattggttgaaactcgccaaatcactaagcatgtggcacaaattttggatagtcgcatgaatactaaatacgatgaaaatgataaacttattcgagaggttaaagtgattaccttaaaatctaaattagtttctgacttccgaaaagatttccaattctataaagtacgtgagattaacaattaccatcatgcccatgatgcgtatctaaatgccgtcgttggaactgctttgattaagaaatatccaaaacttgaatcggagtttgtctatggtgattataaagtttatgatgttcgtaaaatgattgctaagtctgagcaagaaataggcaaagcaaccgcaaaatatttcttttactctaatatcatgaacttcttcaaaacagaaattacacttgcaaatggagagattcgcaaacgccctctaatcgaaactaatggggaaactggagaaattgtctgggataaagggcgagattttgccacagtgcgcaaagtattgtccatgccccaagtcaatattgtcaagaaaacagaagtacagacaggcggattctccaaggagtcaattttaccaaaaagaaattcggacaagcttattgctcgtaaaaaagactgggatccaaaaaaatatggtggttttgatagtccaacggtagcttattcagtcctagtggttgctaaggtggaaaaagggaaatcgaagaagttaaaatccgttaaagagttactagggatcacaattatggaaagaagttcctttgaaaaaaatccgattgactttttagaagctaaaggatataaggaagttaaaaaagacttaatcattaaactacctaaatatagtctttttgagttagaaaacggtcgtaaacggatgctggctagtgccggagaattacaaaaaggaaatgagctggctctgccaagcaaatatgtgaattttttatatttagctagtcattatgaaaagttgaagggtagtccagaagataacgaacaaaaacaattgtttgtggagcagcataagcattatttagatgagattattgagcaaatcagtgaattttctaagcgtgttattttagcagatgccaatttagataaagttcttagtgcatataacaaacatagagacaaaccaatacgtgaacaagcagaaaatattattcatttatttacgttgacgaatcttggagctcccgctgcttttaaatattttgatacaacaattgatcgtaaacgatatacgtctacaaaagaagttttagatgccactcttatccatcaatccatcactggtctttatgaaacacgcattgatttgagtcagctaggaggtgactga

SEQ ID NO: 81 - protein, 1368 aa, Streptococcus pyogenes [sequence omitted]

SEQ ID NO: 82 - protein, 1378 aa, Lactobacillus fermentum
MKEYHIGLDIGTSSIGWAVTDSQFKLMRIKGKTAIGVRLFEEGKTAAERRTFRTTRRRLKRRKWRLHYLDEIFAPHLQEVDENFLRRLKQSNIHPEDPTKNQAFIGKLLFPDLLKKNERGYPTLIKMRDELPVEQRAHYPVMNIYKLREAMINEDRQFDLREVYLAVHHIVKYRGHFLNNASVDKFKVGRIDFDKSFNVLNEAYEELQNGEGSFTIEPSKVEKIGQLLLDTKMRKLDRQKAVAKLLEVKVADKEETKRNKQIATAMSKLVLGYKADFATVAMANGNEWKIDLSSETSEDEIEKFREELSDAQNDILTEITSLFSQIMLNEIVPNGMSISESMMDRYWTHERQLAEVKEYLATQPASARKEFDQVYNKYIGQAPKERGFDLEKGLKKILSKKENWKEIDELLKAGDFLPKQRTSANGVIPHQMHQQELDRIIEKQAKYYPWLATENPATGERDRHQAKYELDQLVSFRIPYYVGPLVTPEVQKATSGAKFAWAKRKEDGEITPWNLWDKIDRAESAEAFIKRMTVKDTYLLNEDVLPANSLLYQKYNVLNELNNVRVNGRRLSVGIKQDIYTELFKKKKTVKASDVASLVMAKTRGVNKPSVEGLSDPKKFNSNLATYLDLKSIVGDKVDDNRYQTDLENIIEWRSVFEDGEIFADKLTEVEWLTDEQRSALVKKRYKGWGRLSKKLLTGIVDENGQRIIDLMWNTDQNFKEIVDQPVFKEQIDQLNQKAITNDGMTLRERVESVLDDAYTSPQNKKAIWQVVRVVEDIVKAVGNAPKSISIEFARNEGNKGEITRSRRTQLQKLFEDQAHELVKDTSLTEELEKAPDLSDRYYFYFTQGGKDMYTGDPINFDEISTKYDIDHILPQSFVKDNSLDNRVLTSRKENNKKSDQVPAKLYAAKMKPYWNQLLKQGLITQRKFENLTKDVDQNIKYRSLGFVKRQLVETRQVIKLTANILGSMYQEAGTEIIETRAGLTKQLREEFDLPKVREVNDYHHAVDAYLTTFAGQYLNRRYPKLRSFFVYGEYMKFKHGSDLKLRNFNFFHELMEGDKSQGKVVDQQTGELITTRDEVAKSFDRLLNMKYMLVSKEVHDRSDQLYGATIVTAKESGKLTSPIEIKKNRLVDLYGAYTNGTSAFMTIIKFTGNKPKYKVIGIPTTSAASLKRAGKPGSESYNQELHRIIKSNPKVKKGFEIVVPHVSYGQLIVDGDCKFTLASPTVQHPATQLVLSKKSLETISSGYKILKDKPAIANERLIRVFDEVVGQMNRYFTIFDQRSNRQKVADARDKFLSLPTESKYEGAKKVQVGKTEVITNLLMGLHANATQGDLKVLGLATFGFFQSTTGLSLSEDTMIVYQSPTGLFERRICLKDI

SEQ ID NO: 83 - protein, 1368 aa, Streptococcus pyogenes [sequence omitted]

SEQ ID NO: 84 - protein, 1053 aa, Staphylococcus aureus
MGKRNYILGLDIGITSVGYGIIDYETRDVIDAGVRLFKEANVENNEGRRSKRGARRLKRRRRHRIQRVKKLLFDYNLLTDHSELSGINPYEARVKGLSQKLSEEEFSAALLHLAKRRGVHNVNEVEEDTGNELSTKEQISRNSKALEEKYVAELQLERLKKDGEVRGSINRFKTSDYVKEAKQLLKVQKAYHQLDQSFIDTYIDLLETRRTYYEGPGEGSPFGWKDIKEWYEMLMGHCTYFPEELRSVKYAYNADLYNALNDLNNLVITRDENEKLEYYEKFQIIENVFKQKKKPTLKQIAKEILVNEEDIKGYRVTSTGKPEFTNLKVYHDIKDITARKEIIENAELLDQIAKILTIYQSSEDIQEELTNLNSELTQEEIEQISNLKGYTGTHNLSLKAINLILDELWHTNDNQIAIFNRLKLVPKKVDLSQQKEIPTTLVDDFILSPVVKRSFIQSIKVINAIIKKYGLPNDIIIELAREKNSKDAQKMINEMQKRNRQTNERIEEIIRTTGKENAKYLIEKIKLHDMQEGKCLYSLEAIPLEDLLNNPFNYEVDHIIPRSVSFDNSFNNKVLVKQEENSKKGNRTPFQYLSSSDSKISYETFKKHILNLAKGKGRISKTKKEYLLEERDINRFSVQKDFINRNLVDTRYATRGLMNLLRSYFRVNNLDVKVKSINGGFTSFLRRKWKFKKERNKGYKHHAEDALIIANADFIFKEWKKLDKAKKVMENQMFEEKQAESMPEIETEQEYKEIFITPHQIKHIKDFKDYKYSHRVDKKPNRKLINDTLYSTRKDDKGNTLIVNNLNGLYDKDNDKLKKLINKSPEKLLMYHHDPQTYQKLKLIMEQYGDEKNPLYKYYEETGNYLTKYSKKDNGPVIKKIKYYGNKLNAHLDITDDYPNSRNKVVKLSLKPYRFDVYLDNGVYKFVTVKNLDVIKKENYYEVNSKCYEEAKKLKKISNQAEFIASFYKNDLIKINGELYRVIGVNNDLLNRIEVNMIDITYREYLENMNDKRPPHIIKTIASKTQSIKKYSTDILGNLYEVKSKKHPQIIKK

SEQ ID NO: 85 - protein, 1409 aa, Streptococcus thermophilus
MLFNKCIIISINLDFSNKEKCMTKPYSIGLDIGTNSVGWAVITDNYKVPSKKMKVLGNTSKKYIKKNLLGVLLFDSGITAEGRRLKRTARRRYTRRRNRILYLQEIFSTEMATLDDAFFQRLDDSFLVPDDKRDSKYPIFGNLVEEKVYHDEFPTIYHLRKYLADSTKKADLRLVYLALAHMIKYRGHFLIEGEFNSKNNDIQKNFQDFLDTYNAIFESDLSLENSKQLEEIVKDKISKLEKKDRILKLFPGEKNSGIFSEFLKLIVGNQADFRKCFNLDEKASLHFSKESYDEDLETLLGYIGDDYSDVFLKAKKLYDAILLSGFLTVTDNETEAPLSSAMIKRYNEHKEDLALLKEYIRNISLKTYNEVFKDDTKNGYAGYIDGKTNQEDFYVYLKNLLAEFEGADYFLEKIDREDFLRKQRTFDNGSIPYQIHLQEMRAILDKQAKFYPFLAKNKERIEKILTFRIPYYVGPLARGNSDFAWSIRKRNEKITPWNFEDVIDKESSAEAFINRMTSFDLYLPEEKVLPKHSLLYETFNVYNELTKVRFIAESMRDYQFLDSKQKKDIVRLYFKDKRKVTDKDIIEYLHAIYGYDGIELKGIEKQFNSSLSTYHDLLNIINDKEFLDDSSNEAIIEEIIHTLTIFEDREMIKQRLSKFENIFDKSVLKKLSRRHYTGWGKLSAKLINGIRDEKSGNTILDYLIDDGISNRNFMQLIHDDALSFKKKIQKAQIIGDEDKGNIKEVVKSLPGSPAIKKGILQSIKIVDELVKVMGGRKPESIVVEMARENQYTNQGKSNSQQRLKRLEKSLKELGSKILKENIPAKLSKIDNNALQNDRLYLYYLQNGKDMYTGDDLDIDRLSNYDIDHIIPQAFLKDNSIDNKVLVSSASNRGKSDDFPSLEVVKKRKTFWYQLLKSKLISQRKFDNLTKAERGGLLPEDKAGFIQRQLVETRQITKHVARLLDEKFNNKKDENNRAVRTVKIITLKSTLVSQFRKDFELYKVREINDFHHAHDAYLNAVIASALLKKYPKLEPEFVYGDYPKYNSFRERKSATEKVYFYSNIMNIFKKSISLADGRVIERPLIEVNEETGESVWNKESDLATVRRVLSYPQVNVVKKVEEQNHGLDRGKPKGLFNANLSSKPKPNSNENLVGAKEYLDPKKYGGYAGISNSFAVLVKGTIEKGAKKKITNVLEFQGISILDRINYRKDKLNFLLEKGYKDIELIIELPKYSLFELSDGSRRMLASILSTNNKRGEIHKGNQIFLSQKFVKLLYHAKRISNTINENHRKYVENHKKEFEELFYYILEFNENYVGAKKNGKLLNSAFQSWQNHSIDELCSSFIGPTGSERKGLFELTSRGSAADFEFLGVKIPRYRDYTPSSLLKDATLIHQSVTGLYETRIDLAKLGEG

SEQ ID NO: 86 - protein, 1402 aa, Lactobacillus crispatus
MKIKNYNLALTPSTSAVGHVEVDDDLNILEPVHHQKAIGVAKFGEGETAEARRLARSARRTTKRRANRINHYFNEIMKPEIDKVDPLMFDRIKQAGLSPLDERKEFRTVIFDRPNIASYYHNQFPTIWHLQKYLMITDEKADIRLIYWALHSLLKHRGHFFNTTPMSQFKPGKLNLKDDMLALDDYNDLEGLSFAVANSPEIEKVIKDRSMHKKEKIAELKKLIVNDVPDKDLAKRNNKIITQIVNAIMGNSFHLNFIFDMDLDKLTSKAWSFKLDDPELDTKFDAISGSMTDNQIGIFETLQKIYSAISLLDILNGSSNVVDAKNALYDKHKRDLNLYFKFLNTLPDEIAKTLKAGYTLYIGNRKKDLLAARKLLKVNVAKNFSQDDFYKLINKELKSIDKQGLQTRFSEKVGELVAQNNFLPVQRSSDNVFIPYQLNAITFNKILENQGKYYDFLVKPNPAKKDRKNAPYELSQLMQFTIPYYVGPLVTPEEQVKSGIPKTSRFAWMVRKDNGAITPWNFYDKVDIEATADKFIKRSIAKDSYLLSELVLPKHSLLYEKYEVFNELSNVSLDGKKLSGGVKQILFNEVFKKTNKVNTSRILKALAKHNIPGSKITGLSNPEEFTSSLQTYNAWKKYFPNQIDNFAYQQDLEKMIEWSTVFEDHKILAKKLDEIEWLDDDQKKFVANTRLRGWGRLSKRLLTGLKDNYGKSIMQRLETTKANFQQIVYKPEFREQIDKISQAAAKNQSLEDILANSYTSPSNRKAIRKTMSVVDEYIKLNHGKEPDKIFLMFQRSEQEKGKQTEARSKQLNRILSQLKADKSANKLFSKQLADEFSNAIKKSKYKLNDKQYFYFQQLGRDALTGEVIDYDELYKYTVLHIIPRSKLTDDSQNNKVLTKYKIVDGSVALKFGNSYSDALGMPIKAFWTELNRLKLIPKGKLLNLTTDFSTLNKYQRDGYIARQLVETQQIVKLLATIMQSRFKHTKIIEVRNSQVANIRYQFDYFRIKNLNEYYRGFDAYLAAVVGTYLYKVYPKARRLFVYGQYLKPKKTNQENQDMHLDSEKKSQGFNFLWNLLYGKQDQIFVNGTDVIAFNRKDLITKMNTVYNYKSQKISLAIDYHNGAMFKATLFPRNDRDTAKTRKLIPKKKDYDTDIYGGYTSNVDGYMLLAEIIKRDGNKQYGFYGVPSRLVSELDTLKKTRYTEYEEKLKEIIKPELGVDLKKIKKIKILKNKVPFNQVIIDKGSKFFITSTSYRWNYRQLILSAESQQTLMDLVVDPDFSNHKARKDARKNADERLIKVYEEILYQVKNYMPMFVELHRCYEKLVDAQKTFKSLKISDKAMVLNQILILLHSNATSPVLEKLGYHTRFTLGKKHNLISENAVLVTQSITGLKENHVSIKQML

SEQ ID NO: 87 - protein, 1385 aa, Pedicoccus damnosus
MTNEKYSIGLDIGTSSIGFAVVNDNNRVIRVKGKNAIGVRLFDEGKAAADRRSFRTTRRSFRTTRRRLSRRRWRLKLLREIFDAYITPVDEAFFIRLKESNLSPKDSKKQYSGDILFNDRSDKDFYEKYPTIYHLRNALMTEHRKFDVREIYLAIHHIMKFRGHFLNATPANNFKVGRLNLEEKFEELNDIYQRVFPDESIEFRTDNLEQIKEVLLDNKRSRADRQRTLVSDIYQSSEDKDIEKRNKAVATEILKASLGNKAKLNVITNVEVDKEAAKEWSITFDSESIDDDLAKIEGQMTDDGHEIIEVLRSLYSGITLSAIVPENHTLSQSMVAKYDLHKDHLKLFKKLINGMTDTKKAKNLRAAYDGYIDGVKGKVLPQEDFYKQVQVNLDDSAEANEIQTYIDQDIFMPKQRTKANGSIPHQLQQQELDQIIENQKAYYPWLAELNPNPDKKRQQLAKYKLDELVTFRVPYYVGPMITAKDQKNQSGAEFAWMIRKEPGNITPWNFDQKVDRMATANQFIKRMTTTDTYLLGEDVLPAQSLLYQKFEVLNELNKIRIDHKPISIEQKQQIFNDLFKQFKNVTIKHLQDYLVSQGQYSKRPLIEGLADEKRFNSSLSTYSDLCGIFGAKLVEENDRQEDLEKIIEWSTIFEDKKIYRAKLNDLTWLTDDQKEKLATKRYQGWGRLSRKLLVGLKNSEHRNIMDILWITNENFMQIQAEPDFAKLVTDANKGMLEKTDSQDVINDLYTSPQNKKAIRQILLVVHDIQNAMHGQAPAKIHVEFARGEERNPRRSVQRQRQVEAAYEKVSNELVSAKVRQEFKEAINNKRDFKDRLFLYFMQGGIDIYTGKQLNIDQLSSYQIDHILPQAFVKDDSLTNRVLTNENQVKADSVPIDIFGKKMLSVWGRMKDQGLISKGKYRNLTMNPENISAHTENGFINRQLVETRQVIKLAVNILADEYGDSTQIISVKADLSHQMREDFELLKNRDVNDYHHAFDAYLAAFIGNYLLKRYPKLESYFVYGDFKKFTQKETKMRRFNFIYDLKHCDQVVNKETGEILWTKDEDIKYIRHLFAYKKILVSHEVREKRGALYNQTIYKAKDDKGSGQESKKLIRIKDDKETKIYGGYSGKSLAYMTIVQITKKNKVSYRVIGIPTLALARLNKLENDSTENNGELYKIIKPQFTHYKVDKKNGEIIETTDDFKIVVSKVRFQQLIDDAGQFFMLASDTYKNNAQQLVISNNALKAINNTNITDCPRDDLERLDNLRLDSAFDEIVKKMDKYFSAYDANNFREKIRNSNLIFYQLPVEDQWENNKITELGKRTVLTRILQGLHANATTTDMSIFKIKTPFGQLRQRSGISLSENAQLIYQSPTGLFERRVQLNKIK

SEQ ID NO: 88 - protein, 1367 aa, Fusobaterium nucleatum
MKKQKFSDYYLGFDIGTNSVGWCVTDLDYNVLRFNKKDMWGSRLFEEAKTAAERRVQRNSRRRLKRRKWRLNLLEEIFSNEILKIDSNFFRRLKESSLWLEDKSSKEKFTLFNDDNYKDYDFYKQYPTIFHLRNELIKNPEKKDIRLVYLAIHSIFKSRGHFLFEGQNLKEIKNFETLYNNLIAFLEDNGINKIIDKNNIEKLEKIVCDSKKGLKDKEKEFKEIFNSDKQLVAIFKLSVGSSVSLNDLFDTDEYKKGEVEKEKISFREQIYEDDKPIYYSILGEKIELLDIAKTFYDFMVLNNILADSQYISEAKVKLYEEHKKDLKNLKYIIRKYNKGNYDKLFKDKNENNYSAYIGLNKEKSKKEVIEKSRLKIDDLIKNIKGYLPKVEEIEEKDKAIFNKILNKIELKTILPKQRISDNGTLPYQIHEAELEKILENQSKYYDFLNYEENGIITKDKLLMTFKFRIPYYVGPLNSYHKDKGGNSWIVRKEEGKILPWNFEQKVDIEKSAEEFIKRMTNKCTYLNGEDVIPKDTFLYSEYVILNELNKVQVNDEFLNEENKRKIIDELFKENKKVSEKKFKEYLLVKQIVDGTIELKGVKDSFNSNYISYIRFKDIFGEKLNLDIYKEISEKSILWKCLYGDDKKIFEKKIKNEYGDILTKDEIKKINTFKFNNWGRLSEKLLTGIEFINLETGECYSSVMDALRRTNYNLMELLSSKFTLQESINNENKEMNEASYRDLIEESYVSPSLKRAIFQTLKIYEEIRKITGRVPKKVFIEMARGGDESMKNKKIPARQEQLKKLYDSCGNDIANFSIDIKEMKNSLISYDNNSLRQKKLYLYYLQFGKCMYTGREIDLDRLLQNNDTYDIDHIYPRSKVIKDDSFDNLVLVLKNENAEKSNEYPVKKEIQEKMKSFWRFLKEKNFISDEKYKRLTGKDDFELRGFMARQLVNVRQTTKEVGKILQQIEPEIKIVYSKAEIASSFREMFDFIKVRELNDTHHAKDAYLNIVAGNVYNTKFTEKPYRYLQEIKENYDVKKIYNYDIKNAWDKENSLEIVKKNMEKNTVNITRFIKEKKGQLFDLNPIKKGETSNEIISIKPKVYNGKDDKLNEKYGYYKSLNPAYFLYVEHKEKNKRIKSFERVNLVDVNNIKDEKSLVKYLIENKKLVEPRVIKKVYKRQVILINDYPYSIVTLDSNKLMDFENLKPLFLENKYEKILKNVIKFLEDNQGKSEENYKFIYLKKKDRYEKNETLESVKDRYNLEFNEMYDKFLEKLDSKDYKNYMNNKKYQELLDVKEKFIKLNLFDKAFTLKSFLDLFNRKTMADFSKVGLTKYLGKIQKISSNVLSKNELYLLEESVTGLFVKKIKL

SEQ ID NO: 89 - protein, 1286 aa, Enterococcus cecorum
RRKQRIQILQELLGEEVLKTDPGFFHRMKESRYVVEDKRTLDGKQVELPYALFVDKDYTDKEYYKQFPTINHLIVYLMTTSDTPDIRLVYLALHYYMKNRGNFLHSGDINNVKDINDILEQLDNVLETFLDGWNLKLKSYVEDIKNIYNRDLGRGERKKAFVNTLGAKTKAEKAFCSLISGGSTNLAELFDDSSLKEIETPKIEFASSSLEDKIDGIQEALEDRFAVIEAAKRLYDWKTLTDILGDSSSLAEARVNSYQMHHEQLLELKSLVKEYLDRKVFQEVFVSLNVANNYPAYIGHTKINGKKKELEVKRTKRNDFYSYVKKQVIEPIKKKVSDEAVLTKLSEIESLIEVDKYLPLQVNSDNGVIPYQVKLNELTRIFDNLENRIPVLRENRDKIIKTFKFRIPYYVGSLNGVVKNGKCTNWMVRKEEGKIYPWNFEDKVDLEASAEQFIRRMTNKCTYLVNEDVLPKYSLLYSKYLVLSELNNLRIDGRPLDVKIKQDIYENVFKKNRKVTLKKIKKYLLKEGIITDDDELSGLADDVKSSLTAYRDFKEKLGHLDLSEAQMENIILNITLFGDDKKLLKKRLAALYPFIDDKSLNRIATLNYRDWGRLSERFLSGITSVDQETGELRTIIQCMYETQANLMQLLAEPYHFVEAIEKENPKVDLESISYRIVNDLYVSPAVKRQIWQTLLVIKDIKQVMKHDPERIFIEMAREKQESKKTKSRKQVLSEVYKKAKEYEHLFEKLNSLTEEQLRSKKIYLYFTQLGKCMYSGEPIDFENLVSANSNYDIDHIYPQSKTIDDSFNNIVLVKKSLNAYKSNHYPIDKNIRDNEKVKTLWNTLVSKGLITKEKYERLIRSTPFSDEELAGFIARQLVETRQSTKAVAEILSNWFPESEIVYSKAKNVSNFRQDFEILKVRELNDCHHAHDAYLNIVVGNAYHTKFTNSPYRFIKNKANQEYNLRKLLQKVNKIESNGVVAWVGQSENNPGTIATVKKVIRRNTVLISRMVKEVDGQLFDLTLMKKGKGQVPIKSSDERLTDISKYGGYNKATGAYFTFVKSKKRGKVVRSFEYVPLHLSKQFENNNELLKEYIEKDRGLTDVEILIPKVLINSLFRYNGSLVRITGRGDTRLLLVHEQPLYVSNSFVQQLKSVSSYKLKKSENDNAKLTKTATEKLSNIDELYDGLLRKLDLPIYSYWFSSIKEYLVESRTKYIKLSIEEKALVIFEILHLFQSDAQVPNLKILGLSTKPSRIRIQKNLKDTDKMSIIHQSPSGIFEHEIELTSL

SEQ ID NO: 90 - protein, 1312 aa, Unknown
  Anaerostipes hadrus
MQNGFLGITVSSEQVGWAVTNPKYELERASRKDLWGVRLFDKAETAEDRRMFRTNRRLNQRKKNRIHYLRDIFHEEVNQKDPNFFQQLDESNFCEDDRTVEFNFDTNLYKNQFPTVYHLRKYLMETKDKPDIRLVYLAFSKFMKNRGHFLYKGNLGEVMDFENSMKGFCESLEKFNIDFPTLSDEQVKEVRDILCDHKIAKTVKKKNIITITKVKSKTAKAWIGLFCGCSVPVKVLFQDIDEEIVTDPEKISFEDASYDDYIANIEKGVGIYYEAIVSAKMLFDWSILNEILGDHQLLSDAMIAEYNKHHDDLKRLQKIIKGTGSRELYQDIFINDVSGNYVCYVGHAKTMSSADQKQFYTFLKNRLKNVNGISSEDAEWIDTEIKNGTLLPKQTKRDNSVIPHQLQLREFELILDNMQEMYPFLKENREKLLKIFNFVIPYYVGPLKGVVRKGESTNWMVPKKDGVIHPWNFDEMVDKEASAECFISRMTGNCSYLFNEKVLPKNSLLYETFEVLNELNPLKINGEPISVELKQRIYEQLFLTGKKVTKKSLTKYLIKNGYDKDIELSGIDNEFHSNLKSHIDFEDYDNLSDEEVEQIILRITVFEDKQLLKDYLNREFVKLSEDERKQICSLSYKGWGNLSEMLLNGITVTDSNGVEVSVMDMLWNTNLNLMQILSKKYGYKAEIEHYNKEHEKTIYNREDLMDYLNIPPAQRRKVNQLITIVKSLKKTYGVPNKIFFKISREHQDDPKRTSSRKEQLKYLYKSLKSEDEKHLMKELDELNDHELSNDKVYLYFLQKGRCIYSGKKLNLSRLRKSNYQNDIDYIYPLSAVNDRSMNNKVLTGIQENRADKYTYFPVDSEIQKKMKGFWMELVLQGFMTKEKYFRLSRENDFSKSELVSFIEREISDNQQSGRMIASVLQYYFPESKIVFVKEKLISSFKRDFHLISSYGHNHLQAAKDAYITIVVGNVYHTKFTMDPAIYFKNHKRKDYDLNRLFLENISRDGQIAWESGPYGSIQTVRKEYAQNHIAVTKRVVEVKGGLFKQMPLKKGHGEYPLKTNDPRFGNIAQYGGYTNVTGSYFVLVESMEKGKKRISLEYVPVYLHERLEDDPGHKLLKEYLVDHRKLNHPKILLAKVRKNSLLKIDGFYYRLNGRSGNALILTNAVELIMDDWQTKTANKISGYMKRRAIDKKARVYQNEFHIQELEQLYDFYLDKLKNGVYKNRKNNQAELIHNEKEQFMELKTEDQCVLLTEIKKLFVCSPMQADLTLIGGSKHTGMIAMSSNVTKADFAVIAEDPLGLRNKVIYSHKGEK

SEQ ID NO: 91 - protein, 1344 aa, Kandleria vitulina
MSQNNNKIYNIGLDIGDASVGWAVVDEHYNLLKRHGKHMWGSRLFTQANTAVERRSSRSTRRRYNKRRERIRLLREIMEDMVLDVDPTFFIRLANVSFLDQEDKKDYLKENYHSNYNLFIDKDFNDKTYYDKYPTIYHLRKHLCESKEKEDPRLIYLALHHIVKYRGNFLYEGQKFSMDVSNIEDKMIDVLRQFNEINLFEYVEDRKKIDEVLNVLKEPLSKKHKAEKAFALFDTTKDNKAAYKELCAALAGNKFNVTKMLKEAELHDEDEKDISFKFSDATFDDAFVEKQPLLGDCVEFIDLLHDIYSWVELQNILGSAHTSEPSISAAMIQRYEDHKNDLKLLKDVIRKYLPKKYFEVFRDEKSKKNNYCNYINHPSKTPVDEFYKYIKKLIEKIDDPDVKTILNKIELESFMLKQNSRTNGAVPYQMQLDELNKILENQSVYYSDLKDNEDKIRSILTFRIPYYFGPLNITKDRQFDWIIKKEGKENERILPWNANEIVDVDKTADEFIKRMRNFCTYFPDEPVMAKNSLTVSKYEVLNEINKLRINDHLIKRDMKDKMLHTLFMDHKSISANAMKKWLVKNQYFSNTDDIKIEGFQKENACSTSLTPWIDFTKIFGKINESNYDFIEKIIYDVTVFEDKKILRRRLKKEYDLDEEKIKKILKLKYSGWSRLSKKLLSGIKTKYKDSTRTPETVLEVMERTNMNLMQVINDEKLGFKKTIDDANSTSVSGKFSYAEVQELAGSPAIKRGIWQALLIVDEIKKIMKHEPAHVYIEFARNEDEKERKDSFVNQMLKLYKDYDFEDETEKEANKHLKGEDAKSKIRSERLKLYYTQMGKCMYTGKSLDIDRLDTYQVDHIVPQSLLKDDSIDNKVLVLSSENQRKLDDLVIPSSIRNKMYGFWEKLFNNKIISPKKFYSLIKTEFNEKDQERFINRQIVETRQITKHVAQIIDNHYENTKVVTVRADLSHQFRERYHIYKNRDINDFHHAHDAYIATILGTYIGHRFESLDAKYIYGEYKRIFRNQKNKGKEMKKNNDGFILNSMRNIYADKDTGEIVWDPNYIDRIKKCFYYKDCFVTKKLEENNGTFFNVTVLPNDTNSDKDNTLATVPVNKYRSNVNKYGGFSGVNSFIVAIKGKKKKGKKVIEVNKLTGIPLMYKNADEEIKINYLKQAEDLEEVQIGKEILKNQLIEKDGGLYYIVAPTEIINAKQLILNESQTKLVCEIYKAMKYKNYDNLDSEKIIDLYRLLINKMELYYPEYRKQLVKKFEDRYEQLKVISIEEKCNIIKQILATLHCNSSIGKIMYSDFKISTTIGRLNGRTISLDDISFIAESPTGMYSKKYKL

SEQ ID NO: 92 - protein, 1288 aa, Enterococcus faecalis
MRLFEEGHTAEDRRLKRTARRRISRRRNRLRYLQAFFEEAMTDLDENFFARLQESFLVPEDKKWHRHPIFAKLEDEVAYHETYPTIYHLRKKLADSSEQADLRLIYLALAHIVKYRGHFLIEGKLSTENTSVKDQFQQFMVIYNQTFVNGESRLVSAPLPESVLIEEELTEKASRTKKSEKVLQQFPQEKANGLFGQFLKLMVGNKADFKKVFGLEEEAKITYASESYEEDLEGILAKVGDEYSDVFLAAKNVYDAVELSTILADSDKKSHAKLSSSMIVRFTEHQEDLKKFKRFIRENCPDEYDNLFKNEQKDGYAGYIAHAGKVSQLKFYQYVKKIIQDIAGAEYFLEKIAQENFLRKQRTFDNGVIPHQIHLAELQAIIHRQAAYYPFLKENQEKIEQLVTFRIPYYVGPLSKGDASTFAWLKRQSEEPIRPWNLQETVDLDQSATAFIERMTNFDTYLPSEKVLPKHSLLYEKFMVFNELTKISYTDDRGIKANFSGKEKEKIFDYLFKTRRKVKKKDIIQFYRNEYNTEIVTLSGLEEDQFNASFSTYQDLLKCGLTRAELDHPDNAEKLEDIIKILTIFEDRQRIRTQLSTFKGQFSAEVLKKLERKHYTGWGRLSKKLINGIYDKESGKTILDYLVKDDGVSKHYNRNFMQLINDSQLSFKNAIQKAQSSEHEETLSETVNELAGSPAIKKGIYQSLKIVDELVAIMGYAPKRIVVEMARENQTTSTGKRRSIQRLKIVEKAMAEIGSNLLKEQPTTNEQLRDTRLFLYYMQNGKDMYTGDELSLHRLSHYDIDHIIPQSFMKDDSLDNLVLVGSTENRGKSDDVPSKEVVKDMKAYWEKLYAAGLISQRKFQRLTKGEQGGLTLEDKAHFIQRQLVETRQITKNVAGILDQRYNAKSKEKKVQIITLKASLTSQFRSIFGLYKVREVNDYHHGQDAYLNCVVATTLLKVYPNLAPEFVYGEYPKFQTFKENKATAKAIIYTNLLRFFTEDEPRFTKDGEILWSNSYLKTIKKELNYHQMNIVKKVEVQKGGFSKESIKPKGPSNKLIPVKNGLDPQKYGGFDSPVVAYTVLFTHEKGKKPLIKQEILGITIMEKTRFEQNPILFLEEKGFLRPRVLMKLPKYTLYEFPEGRRRLLASAKEAQKGNQMVLPEHLLTLLYHAKQCLLPNQSESLAYVEQHQPEFQEILERVVDFAEVHTLAKSKVQQIVKLFEANQTADVKEIAASFIQLMQFNAMGAPSTFKFFQKDIERARYTSIKEIFDATIIYQSPTGLYETRRKVVD

SEQ ID NO: 93 - protein, 1052 aa, Staphylococcus aureus
KRNYILGLDIGITSVGYGIIDYETRDVIDAGVRLFKEANVENNEGRRSKRGARRLKRRRRHRIQRVKKLLFDYNLLTDHSELSGINPYEARVKGLSQKLSEEEFSAALLHLAKRRGVHNVNEVEEDTGNELSTKEQISRNSKALEEKYVAELQLERLKKDGEVRGSINRFKTSDYVKEAKQLLKVQKAYHQLDQSFIDTYIDLLETRRTYYEGPGEGSPFGWKDIKEWYEMLMGHCTYFPEELRSVKYAYNADLYNALNDLNNLVITRDENEKLEYYEKFQIIENVFKQKKKPTLKQIAKEILVNEEDIKGYRVTSTGKPEFTNLKVYHDIKDITARKEIIENAELLDQIAKILTIYQSSEDIQEELTNLNSELTQEEIEQISNLKGYTGTHNLSLKAINLILDELWHTNDNQIAIFNRLKLVPKKVDLSQQKEIPTTLVDDFILSPVVKRSFIQSIKVINAIIKKYGLPNDIIIELAREKNSKDAQKMINEMQKRNRQTNERIEEIIRTTGKENAKYLIEKIKLHDMQEGKCLYSLEAIPLEDLLNNPFNYEVDHIIPRSVSFDNSFNNKVLVKQEENSKKGNRTPFQYLSSSDSKISYETFKKHILNLAKGKGRISKTKKEYLLEERDINRFSVQKDFINRNLVDTRYATRGLMNLLRSYFRVNNLDVKVKSINGGFTSFLRRKWKFKKERNKGYKHHAEDALIIANADFIFKEWKKLDKAKKVMENQMFEEKQAESMPEIETEQEYKEIFITPHQIKHIKDFKDYKYSHRVDKKPNRELINDTLYSTRKDDKGNTLIVNNLNGLYDKDNDKLKKLINKSPEKLLMYHHDPQTYQKLKLIMEQYGDEKNPLYKYYEETGNYLTKYSKKDNGPVIKKIKYYGNKLNAHLDITDDYPNSRNKVVKLSLKPYRFDVYLDNGVYKFVTVKNLDVIKKENYYEVNSKCYEEAKKLKKISNQAEFIASFYNNDLIKINGELYRVIGVNNDLLNRIEVNMIDITYREYLENMNDKRPPRIIKTIASKTQSIKKYSTDILGNLYEVKSKKHPQIIKKG

SEQ ID NO: 94 - protein, 1082 aa, Geobacillus thermodenitrificans
MKYKIGLDIGITSIGWAVINLDIPRIEDLGVRIFDRAENPKTGESLALPRRLARSARRRLRRRKHRLERIRRLFVREGILTKEELNKLFEKKHEIDVWQLRVEALDRKLNNDELARILLHLAKRRGFRSNRKSERTNKENSTMLKHIEENQSILSSYRTVAEMVVKDPKFSLHKRNKEDNYTNTVARDDLEREIKLIFAKQREYGNIVCTEAFEHEYISIWASQRPFASKDDIEKKVGFCTFEPKEKRAPKATYTFQSFTVWEHINKLRLVSPGGIRALTDDERRLIYKQAFHKNKITFHDVRTLLNLPDDTRFKGLLYDRNTTLKENEKVRFLELGAYHKIRKAIDSVYGKGAAKSFRPIDFDTFGYALTMFKDDTDIRSYLRNEYEQNGKRMENLADKVYDEELIEELLNLSFSKFGHLSLKALRNILPYMEQGEVYSTACERAGYTFTGPKKKQKTVLLPNIPPIANPVVMRALTQARKVVNAIIKKYGSPVSIHIELARELSQSFDERRKMQKEQEGNRKKNETAIRQLVEYGLTLNPTGLDIVKFKLWSEQNGKCAYSLQPIEIERLLEPGYTEVDHVIPYSRSLDDSYTNKVLVLTKENREKGNRTPAEYLGLGSERWQQFETFVLTNKQFSKKKRDRLLRLHYDENEENEFKNRNLNDTRYISRFLANFIREHLKFADSDDKQKVYTVNGRITAHLRSRWNFNKNREESNLHHAVDAAIVACTTPSDIARVTAFYQRREQNKELSKKTDPQFPQPWPHFADELQARLSKNPKESIKALNLGNYDNEKLESLQPVFVSRMPKRSITGAAHQETLRRYIGIDERSGKIQTVVKKKLSEIQLDKTGHFPMYGKESDPRTYEAIRQRLLEHNNDPKKAFQEPLYKPKKNGELGPIIRTIKIIDTTNQVIPLNDGKTVAYNSNIVRVDVFEKDGKYYCVPIYTIDMMKGILPNKAIEPNKPYSEWKEMTEDYTFRFSLYPNDLIRIEFPREKTIKTAVGEEIKIKDLFAYYQTIDSSNGGLSLVSHDNNFSLRSIGSRTLKRFEKYQVDVLGNIYKVRGEKRVGVASSSHSKAGETIRPL

SEQ ID NO: 95 - protein, 1375 aa, Streptococcus canis
MEKKYSIGLDIGTNSVGWAVITDDYKVPSKKFKVLGNTNRKSIKKNLMGALLFDSGETAEATRLKRTARRRYTRRKNRIRYLQEIFANEMAKLDDSFFQRLEESFLVEEDKKNERHPIFGNLADEVAYHRNYPTIYHLRKKLADSPEKADLRLIYLALAHIIKFRGHFLIEGKLNAENSDVAKLFYQLIQTYNQLFEESPLDEIEVDAKGILSARLSKSKRLEKLIAVFPNEKKNGLFGNIIALALGLTPNFKSNFDLTEDAKLQLSKDTYDDDLDELLGQIGDQYADLFSAAKNLSDAILLSDILRSNSEVTKAPLSASMVKRYDEHHQDLALLKTLVRQQFPEKYAEIFKDDTKNGYAGYVGIGIKHRKRTTKLATQEEFYKFIKPILEKMDGAEELLAKLNRDDLLRKQRTFDNGSIPHQIHLKELHAILRRQEEFYPFLKENREKIEKILTFRIPYYVGPLARGNSRFAWLTRKSEEAITPWNFEEVVDKGASAQSFIERMTNFDEQLPNKKVLPKHSLLYEYFTVYNELTKVKYVTERMRKPEFLSGEQKKAIVDLLFKTNRKVTVKQLKEDYFKKIECFDSVEIIGVEDRFNASLGTYHDLLKIIKDKDFLDNEENEDILEDIVLTLTLFEDREMIEERLKTYAHLFDDKVMKQLKRRHYTGWGRLSRKMINGIRDKQSGKTILDFLKSDGFSNRNFMQLIHDDSLTFKEEIEKAQVSGQGDSLHEQIADLAGSPAIKKGILQTVKIVDELVKVMGHKPENIVIEMARENQTTTKGLQQSRERKKRIEEGIKELESQILKENPVENTQLQNEKLYLYYLQNGRDMYVDQELDINRLSDYDVDHIVPQSFIKDDSIDNKVLTRSVENRGKSDNVPSEEVVKKMKNYWRQLLNAKLITQRKFDNLTKAERGGLSEADKAGFIKRQLVETRQITKHVARILDSRMNTKRDKNDKPIREVKVITLKSKLVSDFRKDFQLYKVRDINNYHHAHDAYLNAVVGTALIKKYPKLESEFVYGDYKVYDVRKMIAKSEQEIGKATAKRFFYSNIMNFFKTEVKLANGEIRKRPLIETNGETGEVVWNKEKDFATVRKVLAMPQVNIVKKTEVQTGGFSKESILSKRESAKLIPRKKGWDTRKYGGFGSPTVAYSILVVAKVEKGKAKKLKSVKVLVGITIMEKGSYEKDPIGFLEAKGYKDIKKELIFKLPKYSLFELENGRRRMLASATELQKANELVLPQHLVRLLYYTQNISATTGSNNLGYIEQHREEFKEIFEKIIDFSEKYILKNKVNSNLKSSFDEQFAVSDSILLSNSFVSLLKYTSFGASGGFTFLDLDVKQGRLRYQTVTEVLDATLIYQSITGLYETRTDLSQLGGD

SEQ ID NO: 96 - protein, 1368 aa, Streptococcus pyogenes
  misc_feature (10)..(10): Xaa can be any naturally occurring amino acid
  misc_feature (840)..(840): Xaa can be any naturally occurring amino acid
MDKKYSIGLXIGTNSVGWAVITDEYKVPSKKFKVLGNTDRHSIKKNLIGALLFDSGETAEATRLKRTARRRYTRRKNRICYLQEIFSNEMAKVDDSFFHRLEESFLVEEDKKHERHPIFGNIVDEVAYHEKYPTIYHLRKKLVDSTDKADLRLIYLALAHMIKFRGHFLIEGDLNPDNSDVDKLFIQLVQTYNQLFEENPINASGVDAKAILSARLSKSRRLENLIAQLPGEKKNGLFGNLIALSLGLTPNFKSNFDLAEDAKLQLSKDTYDDDLDNLLAQIGDQYADLFLAAKNLSDAILLSDILRVNTEITKAPLSASMIKRYDEHHQDLTLLKALVRQQLPEKYKEIFFDQSKNGYAGYIDGGASQEEFYKFIKPILEKMDGTEELLVKLNREDLLRKQRTFDNGSIPHQIHLGELHAILRRQEDFYPFLKDNREKIEKILTFRIPYYVGPLARGNSRFAWMTRKSEETITPWNFEEVVDKGASAQSFIERMTNFDKNLPNEKVLPKHSLLYEYFTVYNELTKVKYVTEGMRKPAFLSGEQKKAIVDLLFKTNRKVTVKQLKEDYFKKIECFDSVEISGVEDRFNASLGTYHDLLKIIKDKDFLDNEENEDILEDIVLTLTLFEDREMIEERLKTYAHLFDDKVMKQLKRRRYTGWGRLSRKLINGIRDKQSGKTILDFLKSDGFANRNFMQLIHDDSLTFKEDIQKAQVSGQGDSLHEHIANLAGSPAIKKGILQTVKVVDELVKVMGRHKPENIVIEMARENQTTQKGQKNSRERMKRIEEGIKELGSQILKEHPVENTQLQNEKLYLYYLQNGRDMYVDQELDINRLSDYDVDXIVPQSFLKDDSIDNKVLTRSDKNRGKSDNVPSEEVVKKMKNYWRQLLNAKLITQRKFDNLTKAERGGLSELDKAGFIKRQLVETRQITKHVAQILDSRMNTKYDENDKLIREVKVITLKSKLVSDFRKDFQFYKVREINNYHHAHDAYLNAVVGTALIKKYPKLESEFVYGDYKVYDVRKMIAKSEQEIGKATAKYFFYSNIMNFFKTEITLANGEIRKRPLIETNGETGEIVWDKGRDFATVRKVLSMPQVNIVKKTEVQTGGFSKESILPKRNSDKLIARKKDWDPKKYGGFDSPTVAYSVLVVAKVEKGKSKKLKSVKELLGITIMERSSFEKNPIDFLEAKGYKEVKKDLIIKLPKYSLFELENGRKRMLASAGELQKGNELALPSKYVNFLYLASHYEKLKGSPEDNEQKQLFVEQHKHYLDEIIEQISEFSKRVILADANLDKVLSAYNKHRDKPIREQAENIIHLFTLTNLGAPAAFKYFDTTIDRKRYTSTKEVLDATLIHQSITGLYETRIDLSQLGGD

SEQ ID NO: 97 - protein, 1368 aa, Streptococcus pyogenes
MDKKYSIGLAIGTNSVGWAVITDEYKVPSKKFKVLGNTDRHSIKKNLIGALLFDSGETAEATRLKRTARRRYTRRKNRICYLQEIFSNEMAKVDDSFFHRLEESFLVEEDKKHERHPIFGNIVDEVAYHEKYPTIYHLRKKLVDSTDKADLRLIYLALAHMIKFRGHFLIEGDLNPDNSDVDKLFIQLVQTYNQLFEENPINASGVDAKAILSARLSKSRRLENLIAQLPGEKKNGLFGNLIALSLGLTPNFKSNFDLAEDAKLQLSKDTYDDDLDNLLAQIGDQYADLFLAAKNLSDAILLSDILRVNTEITKAPLSASMIKRYDEHHQDLTLLKALVRQQLPEKYKEIFFDQSKNGYAGYIDGGASQEEFYKFIKPILEKMDGTEELLVKLNREDLLRKQRTFDNGSIPHQIHLGELHAILRRQEDFYPFLKDNREKIEKILTFRIPYYVGPLARGNSRFAWMTRKSEETITPWNFEEVVDKGASAQSFIERMTNFDKNLPNEKVLPKHSLLYEYFTVYNELTKVKYVTEGMRKPAFLSGEQKKAIVDLLFKTNRKVTVKQLKEDYFKKIECFDSVEISGVEDRFNASLGTYHDLLKIIKDKDFLDNEENEDILEDIVLTLTLFEDREMIEERLKTYAHLFDDKVMKQLKRRRYTGWGRLSRKLINGIRDKQSGKTILDFLKSDGFANRNFMQLIHDDSLTFKEDIQKAQVSGQGDSLHEHIANLAGSPAIKKGILQTVKVVDELVKVMGRHKPENIVIEMARENQTTQKGQKNSRERMKRIEEGIKELGSQILKEHPVENTQLQNEKLYLYYLQNGRDMYVDQELDINRLSDYDVDAIVPQSFLKDDSIDNKVLTRSDKNRGKSDNVPSEEVVKKMKNYWRQLLNAKLITQRKFDNLTKAERGGLSELDKAGFIKRQLVETRQITKHVAQILDSRMNTKYDENDKLIREVKVITLKSKLVSDFRKDFQFYKVREINNYHHAHDAYLNAVVGTALIKKYPKLESEFVYGDYKVYDVRKMIAKSEQEIGKATAKYFFYSNIMNFFKTEITLANGEIRKRPLIETNGETGEIVWDKGRDFATVRKVLSMPQVNIVKKTEVQTGGFSKESILPKRNSDKLIARKKDWDPKKYGGFDSPTVAYSVLVVAKVEKGKSKKLKSVKELLGITIMERSSFEKNPIDFLEAKGYKEVKKDLIIKLPKYSLFELENGRKRMLASAGELQKGNELALPSKYVNFLYLASHYEKLKGSPEDNEQKQLFVEQHKHYLDEIIEQISEFSKRVILADANLDKVLSAYNKHRDKPIREQAENIIHLFTLTNLGAPAAFKYFDTTIDRKRYTSTKEVLDATLIHQSITGLYETRIDLSQLGGD

SEQ ID NO: 98 - protein, 1368 aa, Streptococcus pyogenes
  misc_feature (10)..(10): Xaa can be any naturally occurring amino acid
MDKKYSIGLXIGTNSVGWAVITDEYKVPSKKFKVLGNTDRHSIKKNLIGALLFDSGETAEATRLKRTARRRYTRRKNRICYLQEIFSNEMAKVDDSFFHRLEESFLVEEDKKHERHPIFGNIVDEVAYHEKYPTIYHLRKKLVDSTDKADLRLIYLALAHMIKFRGHFLIEGDLNPDNSDVDKLFIQLVQTYNQLFEENPINASGVDAKAILSARLSKSRRLENLIAQLPGEKKNGLFGNLIALSLGLTPNFKSNFDLAEDAKLQLSKDTYDDDLDNLLAQIGDQYADLFLAAKNLSDAILLSDILRVNTEITKAPLSASMIKRYDEHHQDLTLLKALVRQQLPEKYKEIFFDQSKNGYAGYIDGGASQEEFYKFIKPILEKMDGTEELLVKLNREDLLRKQRTFDNGSIPHQIHLGELHAILRRQEDFYPFLKDNREKIEKILTFRIPYYVGPLARGNSRFAWMTRKSEETITPWNFEEVVDKGASAQSFIERMTNFDKNLPNEKVLPKHSLLYEYFTVYNELTKVKYVTEGMRKPAFLSGEQKKAIVDLLFKTNRKVTVKQLKEDYFKKIECFDSVEISGVEDRFNASLGTYHDLLKIIKDKDFLDNEENEDILEDIVLTLTLFEDREMIEERLKTYAHLFDDKVMKQLKRRRYTGWGRLSRKLINGIRDKQSGKTILDFLKSDGFANRNFMQLIHDDSLTFKEDIQKAQVSGQGDSLHEHIANLAGSPAIKKGILQTVKVVDELVKVMGRHKPENIVIEMARENQTTQKGQKNSRERMKRIEEGIKELGSQILKEHPVENTQLQNEKLYLYYLQNGRDMYVDQELDINRLSDYDVDHIVPQSFLKDDSIDNKVLTRSDKNRGKSDNVPSEEVVKKMKNYWRQLLNAKLITQRKFDNLTKAERGGLSELDKAGFIKRQLVETRQITKHVAQILDSRMNTKYDENDKLIREVKVITLKSKLVSDFRKDFQFYKVREINNYHHAHDAYLNAVVGTALIKKYPKLESEFVYGDYKVYDVRKMIAKSEQEIGKATAKYFFYSNIMNFFKTEITLANGEIRKRPLIETNGETGEIVWDKGRDFATVRKVLSMPQVNIVKKTEVQTGGFSKESILPKRNSDKLIARKKDWDPKKYGGFDSPTVAYSVLVVAKVEKGKSKKLKSVKELLGITIMERSSFEKNPIDFLEAKGYKEVKKDLIIKLPKYSLFELENGRKRMLASAGELQKGNELALPSKYVNFLYLASHYEKLKGSPEDNEQKQLFVEQHKHYLDEIIEQISEFSKRVILADANLDKVLSAYNKHRDKPIREQAENIIHLFTLTNLGAPAAFKYFDTTIDRKRYTSTKEVLDATLIHQSITGLYETRIDLSQLGGD

SEQ ID NO: 99 - protein, 1368 aa, Streptococcus pyogenes
  misc_feature (762)..(762): Xaa can be any naturally occurring amino acid
MDKKYSIGLDIGTNSVGWAVITDEYKVPSKKFKVLGNTDRHSIKKNLIGALLFDSGETAEATRLKRTARRRYTRRKNRICYLQEIFSNEMAKVDDSFFHRLEESFLVEEDKKHERHPIFGNIVDEVAYHEKYPTIYHLRKKLVDSTDKADLRLIYLALAHMIKFRGHFLIEGDLNPDNSDVDKLFIQLVQTYNQLFEENPINASGVDAKAILSARLSKSRRLENLIAQLPGEKKNGLFGNLIALSLGLTPNFKSNFDLAEDAKLQLSKDTYDDDLDNLLAQIGDQYADLFLAAKNLSDAILLSDILRVNTEITKAPLSASMIKRYDEHHQDLTLLKALVRQQLPEKYKEIFFDQSKNGYAGYIDGGASQEEFYKFIKPILEKMDGTEELLVKLNREDLLRKQRTFDNGSIPHQIHLGELHAILRRQEDFYPFLKDNREKIEKILTFRIPYYVGPLARGNSRFAWMTRKSEETITPWNFEEVVDKGASAQSFIERMTNFDKNLPNEKVLPKHSLLYEYFTVYNELTKVKYVTEGMRKPAFLSGEQKKAIVDLLFKTNRKVTVKQLKEDYFKKIECFDSVEISGVEDRFNASLGTYHDLLKIIKDKDFLDNEENEDILEDIVLTLTLFEDREMIEERLKTYAHLFDDKVMKQLKRRRYTGWGRLSRKLINGIRDKQSGKTILDFLKSDGFANRNFMQLIHDDSLTFKEDIQKAQVSGQGDSLHEHIANLAGSPAIKKGILQTVKVVDELVKVMGRHKPENIVIXMARENQTTQKGQKNSRERMKRIEEGIKELGSQILKEHPVENTQLQNEKLYLYYLQNGRDMYVDQELDINRLSDYDVDHIVPQSFLKDDSIDNKVLTRSDKNRGKSDNVPSEEVVKKMKNYWRQLLNAKLITQRKFDNLTKAERGGLSELDKAGFIKRQLVETRQITKHVAQILDSRMNTKYDENDKLIREVKVITLKSKLVSDFRKDFQFYKVREINNYHHAHDAYLNAVVGTALIKKYPKLESEFVYGDYKVYDVRKMIAKSEQEIGKATAKYFFYSNIMNFFKTEITLANGEIRKRPLIETNGETGEIVWDKGRDFATVRKVLSMPQVNIVKKTEVQTGGFSKESILPKRNSDKLIARKKDWDPKKYGGFDSPTVAYSVLVVAKVEKGKSKKLKSVKELLGITIMERSSFEKNPIDFLEAKGYKEVKKDLIIKLPKYSLFELENGRKRMLASAGELQKGNELALPSKYVNFLYLASHYEKLKGSPEDNEQKQLFVEQHKHYLDEIIEQISEFSKRVILADANLDKVLSAYNKHRDKPIREQAENIIHLFTLTNLGAPAAFKYFDTTIDRKRYTSTKEVLDATLIHQSITGLYETRIDLSQLGGD

SEQ ID NO: 100 - protein, 1368 aa, Streptococcus pyogenes
  misc_feature (983)..(983): Xaa can be any naturally occurring amino acid
MDKKYSIGLDIGTNSVGWAVITDEYKVPSKKFKVLGNTDRHSIKKNLIGALLFDSGETAEATRLKRTARRRYTRRKNRICYLQEIFSNEMAKVDDSFFHRLEESFLVEEDKKHERHPIFGNIVDEVAYHEKYPTIYHLRKKLVDSTDKADLRLIYLALAHMIKFRGHFLIEGDLNPDNSDVDKLFIQLVQTYNQLFEENPINASGVDAKAILSARLSKSRRLENLIAQLPGEKKNGLFGNLIALSLGLTPNFKSNFDLAEDAKLQLSKDTYDDDLDNLLAQIGDQYADLFLAAKNLSDAILLSDILRVNTEITKAPLSASMIKRYDEHHQDLTLLKALVRQQLPEKYKEIFFDQSKNGYAGYIDGGASQEEFYKFIKPILEKMDGTEELLVKLNREDLLRKQRTFDNGSIPHQIHLGELHAILRRQEDFYPFLKDNREKIEKILTFRIPYYVGPLARGNSRFAWMTRKSEETITPWNFEEVVDKGASAQSFIERMTNFDKNLPNEKVLPKHSLLYEYFTVYNELTKVKYVTEGMRKPAFLSGEQKKAIVDLLFKTNRKVTVKQLKEDYFKKIECFDSVEISGVEDRFNASLGTYHDLLKIIKDKDFLDNEENEDILEDIVLTLTLFEDREMIEERLKTYAHLFDDKVMKQLKRRRYTGWGRLSRKLINGIRDKQSGKTILDFLKSDGFANRNFMQLIHDDSLTFKEDIQKAQVSGQGDSLHEHIANLAGSPAIKKGILQTVKVVDELVKVMGRHKPENIVIEMARENQTTQKGQKNSRERMKRIEEGIKELGSQILKEHPVENTQLQNEKLYLYYLQNGRDMYVDQELDINRLSDYDVDHIVPQSFLKDDSIDNKVLTRSDKNRGKSDNVPSEEVVKKMKNYWRQLLNAKLITQRKFDNLTKAERGGLSELDKAGFIKRQLVETRQITKHVAQILDSRMNTKYDENDKLIREVKVITLKSKLVSDFRKDFQFYKVREINNYHXAHDAYLNAVVGTALIKKYPKLESEFVYGDYKVYDVRKMIAKSEQEIGKATAKYFFYSNIMNFFKTEITLANGEIRKRPLIETNGETGEIVWDKGRDFATVRKVLSMPQVNIVKKTEVQTGGFSKESILPKRNSDKLIARKKDWDPKKYGGFDSPTVAYSVLVVAKVEKGKSKKLKSVKELLGITIMERSSFEKNPIDFLEAKGYKEVKKDLIIKLPKYSLFELENGRKRMLASAGELQKGNELALPSKYVNFLYLASHYEKLKGSPEDNEQKQLFVEQHKHYLDEIIEQISEFSKRVILADANLDKVLSAYNKHRDKPIREQAENIIHLFTLTNLGAPAAFKYFDTTIDRKRYTSTKEVLDATLIHQSITGLYETRIDLSQLGGD

SEQ ID NO: 101 - protein, 1368 aa, Streptococcus pyogenes
  misc_feature (986)..(986): Xaa can be any naturally occurring amino acid
MDKKYSIGLDIGTNSVGWAVITDEYKVPSKKFKVLGNTDRHSIKKNLIGALLFDSGETAEATRLKRTARRRYTRRKNRICYLQEIFSNEMAKVDDSFFHRLEESFLVEEDKKHERHPIFGNIVDEVAYHEKYPTIYHLRKKLVDSTDKADLRLIYLALAHMIKFRGHFLIEGDLNPDNSDVDKLFIQLVQTYNQLFEENPINASGVDAKAILSARLSKSRRLENLIAQLPGEKKNGLFGNLIALSLGLTPNFKSNFDLAEDAKLQLSKDTYDDDLDNLLAQIGDQYADLFLAAKNLSDAILLSDILRVNTEITKAPLSASMIKRYDEHHQDLTLLKALVRQQLPEKYKEIFFDQSKNGYAGYIDGGASQEEFYKFIKPILEKMDGTEELLVKLNREDLLRKQRTFDNGSIPHQIHLGELHAILRRQEDFYPFLKDNREKIEKILTFRIPYYVGPLARGNSRFAWMTRKSEETITPWNFEEVVDKGASAQSFIERMTNFDKNLPNEKVLPKHSLLYEYFTVYNELTKVKYVTEGMRKPAFLSGEQKKAIVDLLFKTNRKVTVKQLKEDYFKKIECFDSVEISGVEDRFNASLGTYHDLLKIIKDKDFLDNEENEDILEDIVLTLTLFEDREMIEERLKTYAHLFDDKVMKQLKRRRYTGWGRLSRKLINGIRDKQSGKTILDFLKSDGFANRNFMQLIHDDSLTFKEDIQKAQVSGQGDSLHEHIANLAGSPAIKKGILQTVKVVDELVKVMGRHKPENIVIEMARENQTTQKGQKNSRERMKRIEEGIKELGSQILKEHPVENTQLQNEKLYLYYLQNGRDMYVDQELDINRLSDYDVDHIVPQSFLKDDSIDNKVLTRSDKNRGKSDNVPSEEVVKKMKNYWRQLLNAKLITQRKFDNLTKAERGGLSELDKAGFIKRQLVETRQITKHVAQILDSRMNTKYDENDKLIREVKVITLKSKLVSDFRKDFQFYKVREINNYHHAHXAYLNAVVGTALIKKYPKLESEFVYGDYKVYDVRKMIAKSEQEIGKATAKYFFYSNIMNFFKTEITLANGEIRKRPLIETNGETGEIVWDKGRDFATVRKVLSMPQVNIVKKTEVQTGGFSKESILPKRNSDKLIARKKDWDPKKYGGFDSPTVAYSVLVVAKVEKGKSKKLKSVKELLGITIMERSSFEKNPIDFLEAKGYKEVKKDLIIKLPKYSLFELENGRKRMLASAGELQKGNELALPSKYVNFLYLASHYEKLKGSPEDNEQKQLFVEQHKHYLDEIIEQISEFSKRVILADANLDKVLSAYNKHRDKPIREQAENIIHLFTLTNLGAPAAFKYFDTTIDRKRYTSTKEVLDATLIHQSITGLYETRIDLSQLGGD

SEQ ID NO: 102 - protein, 1368 aa, Streptococcus pyogenes
MDKKYSIGLAIGTNSVGWAVITDEYKVPSKKFKVLGNTDRHSIKKNLIGALLFDSGETAEATRLKRTARRRYTRRKNRICYLQEIFSNEMAKVDDSFFHRLEESFLVEEDKKHERHPIFGNIVDEVAYHEKYPTIYHLRKKLVDSTDKADLRLIYLALAHMIKFRGHFLIEGDLNPDNSDVDKLFIQLVQTYNQLFEENPINASGVDAKAILSARLSKSRRLENLIAQLPGEKKNGLFGNLIALSLGLTPNFKSNFDLAEDAKLQLSKDTYDDDLDNLLAQIGDQYADLFLAAKNLSDAILLSDILRVNTEITKAPLSASMIKRYDEHHQDLTLLKALVRQQLPEKYKEIFFDQSKNGYAGYIDGGASQEEFYKFIKPILEKMDGTEELLVKLNREDLLRKQRTFDNGSIPHQIHLGELHAILRRQEDFYPFLKDNREKIEKILTFRIPYYVGPLARGNSRFAWMTRKSEETITPWNFEEVVDKGASAQSFIERMTNFDKNLPNEKVLPKHSLLYEYFTVYNELTKVKYVTEGMRKPAFLSGEQKKAIVDLLFKTNRKVTVKQLKEDYFKKIECFDSVEISGVEDRFNASLGTYHDLLKIIKDKDFLDNEENEDILEDIVLTLTLFEDREMIEERLKTYAHLFDDKVMKQLKRRRYTGWGRLSRKLINGIRDKQSGKTILDFLKSDGFANRNFMQLIHDDSLTFKEDIQKAQVSGQGDSLHEHIANLAGSPAIKKGILQTVKVVDELVKVMGRHKPENIVIEMARENQTTQKGQKNSRERMKRIEEGIKELGSQILKEHPVENTQLQNEKLYLYYLQNGRDMYVDQELDINRLSDYDVDHIVPQSFLKDDSIDNKVLTRSDKNRGKSDNVPSEEVVKKMKNYWRQLLNAKLITQRKFDNLTKAERGGLSELDKAGFIKRQLVETRQITKHVAQILDSRMNTKYDENDKLIREVKVITLKSKLVSDFRKDFQFYKVREINNYHHAHDAYLNAVVGTALIKKYPKLESEFVYGDYKVYDVRKMIAKSEQEIGKATAKYFFYSNIMNFFKTEITLANGEIRKRPLIETNGETGEIVWDKGRDFATVRKVLSMPQVNIVKKTEVQTGGFSKESILPKRNSDKLIARKKDWDPKKYGGFDSPTVAYSVLVVAKVEKGKSKKLKSVKELLGITIMERSSFEKNPIDFLEAKGYKEVKKDLIIKLPKYSLFELENGRKRMLASAGELQKGNELALPSKYVNFLYLASHYEKLKGSPEDNEQKQLFVEQHKHYLDEIIEQISEFSKRVILADANLDKVLSAYNKHRDKPIREQAENIIHLFTLTNLGAPAAFKYFDTTIDRKRYTSTKEVLDATLIHQSITGLYETRIDLSQLGGD

SEQ ID NO: 103 - protein, 1368 aa, Streptococcus pyogenes
MDKKYSIGLDIGTNSVGWAVITDEYKVPSKKFKVLGNTDRHSIKKNLIGALLFDSGETAEATRLKRTARRRYTRRKNRICYLQEIFSNEMAKVDDSFFHRLEESFLVEEDKKHERHPIFGNIVDEVAYHEKYPTIYHLRKKLVDSTDKADLRLIYLALAHMIKFRGHFLIEGDLNPDNSDVDKLFIQLVQTYNQLFEENPINASGVDAKAILSARLSKSRRLENLIAQLPGEKKNGLFGNLIALSLGLTPNFKSNFDLAEDAKLQLSKDTYDDDLDNLLAQIGDQYADLFLAAKNLSDAILLSDILRVNTEITKAPLSASMIKRYDEHHQDLTLLKALVRQQLPEKYKEIFFDQSKNGYAGYIDGGASQEEFYKFIKPILEKMDGTEELLVKLNREDLLRKQRTFDNGSIPHQIHLGELHAILRRQEDFYPFLKDNREKIEKILTFRIPYYVGPLARGNSRFAWMTRKSEETITPWNFEEVVDKGASAQSFIERMTNFDKNLPNEKVLPKHSLLYEYFTVYNELTKVKYVTEGMRKPAFLSGEQKKAIVDLLFKTNRKVTVKQLKEDYFKKIECFDSVEISGVEDRFNASLGTYHDLLKIIKDKDFLDNEENEDILEDIVLTLTLFEDREMIEERLKTYAHLFDDKVMKQLKRRRYTGWGRLSRKLINGIRDKQSGKTILDFLKSDGFANRNFMQLIHDDSLTFKEDIQKAQVSGQGDSLHEHIANLAGSPAIKKGILQTVKVVDELVKVMGRHKPENIVIAMARENQTTQKGQKNSRERMKRIEEGIKELGSQILKEHPVENTQLQNEKLYLYYLQNGRDMYVDQELDINRLSDYDVDHIVPQSFLKDDSIDNKVLTRSDKNRGKSDNVPSEEVVKKMKNYWRQLLNAKLITQRKFDNLTKAERGGLSELDKAGFIKRQLVETRQITKHVAQILDSRMNTKYDENDKLIREVKVITLKSKLVSDFRKDFQFYKVREINNYHHAHDAYLNAVVGTALIKKYPKLESEFVYGDYKVYDVRKMIAKSEQEIGKATAKYFFYSNIMNFFKTEITLANGEIRKRPLIETNGETGEIVWDKGRDFATVRKVLSMPQVNIVKKTEVQTGGFSKESILPKRNSDKLIARKKDWDPKKYGGFDSPTVAYSVLVVAKVEKGKSKKLKSVKELLGITIMERSSFEKNPIDFLEAKGYKEVKKDLIIKLPKYSLFELENGRKRMLASAGELQKGNELALPSKYVNFLYLASHYEKLKGSPEDNEQKQLFVEQHKHYLDEIIEQISEFSKRVILADANLDKVLSAYNKHRDKPIREQAENIIHLFTLTNLGAPAAFKYFDTTIDRKRYTSTKEVLDATLIHQSITGLYETRIDLSQLGGD

SEQ ID NO: 104 - protein, 1368 aa, Streptococcus pyogenes
MDKKYSIGLDIGTNSVGWAVITDEYKVPSKKFKVLGNTDRHSIKKNLIGALLFDSGETAEATRLKRTARRRYTRRKNRICYLQEIFSNEMAKVDDSFFHRLEESFLVEEDKKHERHPIFGNIVDEVAYHEKYPTIYHLRKKLVDSTDKADLRLIYLALAHMIKFRGHFLIEGDLNPDNSDVDKLFIQLVQTYNQLFEENPINASGVDAKAILSARLSKSRRLENLIAQLPGEKKNGLFGNLIALSLGLTPNFKSNFDLAEDAKLQLSKDTYDDDLDNLLAQIGDQYADLFLAAKNLSDAILLSDILRVNTEITKAPLSASMIKRYDEHHQDLTLLKALVRQQLPEKYKEIFFDQSKNGYAGYIDGGASQEEFYKFIKPILEKMDGTEELLVKLNREDLLRKQRTFDNGSIPHQIHLGELHAILRRQEDFYPFLKDNREKIEKILTFRIPYYVGPLARGNSRFAWMTRKSEETITPWNFEEVVDKGASAQSFIERMTNFDKNLPNEKVLPKHSLLYEYFTVYNELTKVKYVTEGMRKPAFLSGEQKKAIVDLLFKTNRKVTVKQLKEDYFKKIECFDSVEISGVEDRFNASLGTYHDLLKIIKDKDFLDNEENEDILEDIVLTLTLFEDREMIEERLKTYAHLFDDKVMKQLKRRRYTGWGRLSRKLINGIRDKQSGKTILDFLKSDGFANRNFMQLIHDDSLTFKEDIQKAQVSGQGDSLHEHIANLAGSPAIKKGILQTVKVVDELVKVMGRHKPENIVIEMARENQTTQKGQKNSRERMKRIEEGIKELGSQILKEHPVENTQLQNEKLYLYYLQNGRDMYVDQELDINRLSDYDVDHIVPQSFLKDDSIDNKVLTRSDKNRGKSDNVPSEEVVKKMKNYWRQLLNAKLITQRKFDNLTKAERGGLSELDKAGFIKRQLVETRQITKHVAQILDSRMNTKYDENDKLIREVKVITLKSKLVSDFRKDFQFYKVREINNYHAAHDAYLNAVVGTALIKKYPKLESEFVYGDYKVYDVRKMIAKSEQEIGKATAKYFFYSNIMNFFKTEITLANGEIRKRPLIETNGETGEIVWDKGRDFATVRKVLSMPQVNIVKKTEVQTGGFSKESILPKRNSDKLIARKKDWDPKKYGGFDSPTVAYSVLVVAKVEKGKSKKLKSVKELLGITIMERSSFEKNPIDFLEAKGYKEVKKDLIIKLPKYSLFELENGRKRMLASAGELQKGNELALPSKYVNFLYLASHYEKLKGSPEDNEQKQLFVEQHKHYLDEIIEQISEFSKRVILADANLDKVLSAYNKHRDKPIREQAENIIHLFTLTNLGAPAAFKYFDTTIDRKRYTSTKEVLDATLIHQSITGLYETRIDLSQLGGD

SEQ ID NO: 105 - protein, 1368 aa, Streptococcus pyogenes
MDKKYSIGLDIGTNSVGWAVITDEYKVPSKKFKVLGNTDRHSIKKNLIGALLFDSGETAEATRLKRTARRRYTRRKNRICYLQEIFSNEMAKVDDSFFHRLEESFLVEEDKKHERHPIFGNIVDEVAYHEKYPTIYHLRKKLVDSTDKADLRLIYLALAHMIKFRGHFLIEGDLNPDNSDVDKLFIQLVQTYNQLFEENPINASGVDAKAILSARLSKSRRLENLIAQLPGEKKNGLFGNLIALSLGLTPNFKSNFDLAEDAKLQLSKDTYDDDLDNLLAQIGDQYADLFLAAKNLSDAILLSDILRVNTEITKAPLSASMIKRYDEHHQDLTLLKALVRQQLPEKYKEIFFDQSKNGYAGYIDGGASQEEFYKFIKPILEKMDGTEELLVKLNREDLLRKQRTFDNGSIPHQIHLGELHAILRRQEDFYPFLKDNREKIEKILTFRIPYYVGPLARGNSRFAWMTRKSEETITPWNFEEVVDKGASAQSFIERMTNFDKNLPNEKVLPKHSLLYEYFTVYNELTKVKYVTEGMRKPAFLSGEQKKAIVDLLFKTNRKVTVKQLKEDYFKKIECFDSVEISGVEDRFNASLGTYHDLLKIIKDKDFLDNEENEDILEDIVLTLTLFEDREMIEERLKTYAHLFDDKVMKQLKRRRYTGWGRLSRKLINGIRDKQSGKTILDFLKSDGFANRNFMQLIHDDSLTFKEDIQKAQVSGQGDSLHEHIANLAGSPAIKKGILQTVKVVDELVKVMGRHKPENIVIEMARENQTTQKGQKNSRERMKRIEEGIKELGSQILKEHPVENTQLQNEKLYLYYLQNGRDMYVDQELDINRLSDYDVDHIVPQSFLKDDSIDNKVLTRSDKNRGKSDNVPSEEVVKKMKNYWRQLLNAKLITQRKFDNLTKAERGGLSELDKAGFIKRQLVETRQITKHVAQILDSRMNTKYDENDKLIREVKVITLKSKLVSDFRKDFQFYKVREINNYHHAHAAYLNAVVGTALIKKYPKLESEFVYGDYKVYDVRKMIAKSEQEIGKATAKYFFYSNIMNFFKTEITLANGEIRKRPLIETNGETGEIVWDKGRDFATVRKVLSMPQVNIVKKTEVQTGGFSKESILPKRNSDKLIARKKDWDPKKYGGFDSPTVAYSVLVVAKVEKGKSKKLKSVKELLGITIMERSSFEKNPIDFLEAKGYKEVKKDLIIKLPKYSLFELENGRKRMLASAGELQKGNELALPSKYVNFLYLASHYEKLKGSPEDNEQKQLFVEQHKHYLDEIIEQISEFSKRVILADANLDKVLSAYNKHRDKPIREQAENIIHLFTLTNLGAPAAFKYFDTTIDRKRYTSTKEVLDATLIHQSITGLYETRIDLSQLGGD

SEQ ID NO: 106 - protein, 1368 aa, Streptococcus pyogenes
  misc_feature (840)..(840): Xaa can be any naturally occurring amino acid
MDKKYSIGLDIGTNSVGWAVITDEYKVPSKKFKVLGNTDRHSIKKNLIGALLFDSGETAEATRLKRTARRRYTRRKNRICYLQEIFSNEMAKVDDSFFHRLEESFLVEEDKKHERHPIFGNIVDEVAYHEKYPTIYHLRKKLVDSTDKADLRLIYLALAHMIKFRGHFLIEGDLNPDNSDVDKLFIQLVQTYNQLFEENPINASGVDAKAILSARLSKSRRLENLIAQLPGEKKNGLFGNLIALSLGLTPNFKSNFDLAEDAKLQLSKDTYDDDLDNLLAQIGDQYADLFLAAKNLSDAILLSDILRVNTEITKAPLSASMIKRYDEHHQDLTLLKALVRQQLPEKYKEIFFDQSKNGYAGYIDGGASQEEFYKFIKPILEKMDGTEELLVKLNREDLLRKQRTFDNGSIPHQIHLGELHAILRRQEDFYPFLKDNREKIEKILTFRIPYYVGPLARGNSRFAWMTRKSEETITPWNFEEVVDKGASAQSFIERMTNFDKNLPNEKVLPKHSLLYEYFTVYNELTKVKYVTEGMRKPAFLSGEQKKAIVDLLFKTNRKVTVKQLKEDYFKKIECFDSVEISGVEDRFNASLGTYHDLLKIIKDKDFLDNEENEDILEDIVLTLTLFEDREMIEERLKTYAHLFDDKVMKQLKRRRYTGWGRLSRKLINGIRDKQSGKTILDFLKSDGFANRNFMQLIHDDSLTFKEDIQKAQVSGQGDSLHEHIANLAGSPAIKKGILQTVKVVDELVKVMGRHKPENIVIEMARENQTTQKGQKNSRERMKRIEEGIKELGSQILKEHPVENTQLQNEKLYLYYLQNGRDMYVDQELDINRLSDYDVDXIVPQSFLKDDSIDNKVLTRSDKNRGKSDNVPSEEVVKKMKNYWRQLLNAKLITQRKFDNLTKAERGGLSELDKAGFIKRQLVETRQITKHVAQILDSRMNTKYDENDKLIREVKVITLKSKLVSDFRKDFQFYKVREINNYHHAHDAYLNAVVGTALIKKYPKLESEFVYGDYKVYDVRKMIAKSEQEIGKATAKYFFYSNIMNFFKTEITLANGEIRKRPLIETNGETGEIVWDKGRDFATVRKVLSMPQVNIVKKTEVQTGGFSKESILPKRNSDKLIARKKDWDPKKYGGFDSPTVAYSVLVVAKVEKGKSKKLKSVKELLGITIMERSSFEKNPIDFLEAKGYKEVKKDLIIKLPKYSLFELENGRKRMLASAGELQKGNELALPSKYVNFLYLASHYEKLKGSPEDNEQKQLFVEQHKHYLDEIIEQISEFSKRVILADANLDKVLSAYNKHRDKPIREQAENIIHLFTLTNLGAPAAFKYFDTTIDRKRYTSTKEVLDATLIHQSITGLYETRIDLSQLGGD

SEQ ID NO: 107 - protein, 1368 aa, Streptococcus pyogenes
MDKKYSIGLDIGTNSVGWAVITDEYKVPSKKFKVLGNTDRHSIKKNLIGALLFDSGETAEATRLKRTARRRYTRRKNRICYLQEIFSNEMAKVDDSFFHRLEESFLVEEDKKHERHPIFGNIVDEVAYHEKYPTIYHLRKKLVDSTDKADLRLIYLALAHMIKFRGHFLIEGDLNPDNSDVDKLFIQLVQTYNQLFEENPINASGVDAKAILSARLSKSRRLENLIAQLPGEKKNGLFGNLIALSLGLTPNFKSNFDLAEDAKLQLSKDTYDDDLDNLLAQIGDQYADLFLAAKNLSDAILLSDILRVNTEITKAPLSASMIKRYDEHHQDLTLLKALVRQQLPEKYKEIFFDQSKNGYAGYIDGGASQEEFYKFIKPILEKMDGTEELLVKLNREDLLRKQRTFDNGSIPHQIHLGELHAILRRQEDFYPFLKDNREKIEKILTFRIPYYVGPLARGNSRFAWMTRKSEETITPWNFEEVVDKGASAQSFIERMTNFDKNLPNEKVLPKHSLLYEYFTVYNELTKVKYVTEGMRKPAFLSGEQKKAIVDLLFKTNRKVTVKQLKEDYFKKIECFDSVEISGVEDRFNASLGTYHDLLKIIKDKDFLDNEENEDILEDIVLTLTLFEDREMIEERLKTYAHLFDDKVMKQLKRRRYTGWGRLSRKLINGIRDKQSGKTILDFLKSDGFANRNFMQLIHDDSLTFKEDIQKAQVSGQGDSLHEHIANLAGSPAIKKGILQTVKVVDELVKVMGRHKPENIVIEMARENQTTQKGQKNSRERMKRIEEGIKELGSQILKEHPVENTQLQNEKLYLYYLQNGRDMYVDQELDINRLSDYDVDAIVPQSFLKDDSIDNKVLTRSDKNRGKSDNVPSEEVVKKMKNYWRQLLNAKLITQRKFDNLTKAERGGLSELDKAGFIKRQLVETRQITKHVAQILDSRMNTKYDENDKLIREVKVITLKSKLVSDFRKDFQFYKVREINNYHHAHDAYLNAVVGTALIKKYPKLESEFVYGDYKVYDVRKMIAKSEQEIGKATAKYFFYSNIMNFFKTEITLANGEIRKRPLIETNGETGEIVWDKGRDFATVRKVLSMPQVNIVKKTEVQTGGFSKESILPKRNSDKLIARKKDWDPKKYGGFDSPTVAYSVLVVAKVEKGKSKKLKSVKELLGITIMERSSFEKNPIDFLEAKGYKEVKKDLIIKLPKYSLFELENGRKRMLASAGELQKGNELALPSKYVNFLYLASHYEKLKGSPEDNEQKQLFVEQHKHYLDEIIEQISEFSKRVILADANLDKVLSAYNKHRDKPIREQAENIIHLFTLTNLGAPAAFKYFDTTIDRKRYTSTKEVLDATLIHQSITGLYETRIDLSQLGGD

SEQ ID NO: 108 - protein, 1368 aa, Streptococcus pyogenes
  misc_feature (864)..(864): Xaa can be any naturally occurring amino acid
MDKKYSIGLDIGTNSVGWAVITDEYKVPSKKFKVLGNTDRHSIKKNLIGALLFDSGETAEATRLKRTARRRYTRRKNRICYLQEIFSNEMAKVDDSFFHRLEESFLVEEDKKHERHPIFGNIVDEVAYHEKYPTIYHLRKKLVDSTDKADLRLIYLALAHMIKFRGHFLIEGDLNPDNSDVDKLFIQLVQTYNQLFEENPINASGVDAKAILSARLSKSRRLENLIAQLPGEKKNGLFGNLIALSLGLTPNFKSNFDLAEDAKLQLSKDTYDDDLDNLLAQIGDQYADLFLAAKNLSDAILLSDILRVNTEITKAPLSASMIKRYDEHHQDLTLLKALVRQQLPEKYKEIFFDQSKNGYAGYIDGGASQEEFYKFIKPILEKMDGTEELLVKLNREDLLRKQRTFDNGSIPHQIHLGELHAILRRQEDFYPFLKDNREKIEKILTFRIPYYVGPLARGNSRFAWMTRKSEETITPWNFEEVVDKGASAQSFIERMTNFDKNLPNEKVLPKHSLLYEYFTVYNELTKVKYVTEGMRKPAFLSGEQKKAIVDLLFKTNRKVTVKQLKEDYFKKIECFDSVEISGVEDRFNASLGTYHDLLKIIKDKDFLDNEENEDILEDIVLTLTLFEDREMIEERLKTYAHLFDDKVMKQLKRRRYTGWGRLSRKLINGIRDKQSGKTILDFLKSDGFANRNFMQLIHDDSLTFKEDIQKAQVSGQGDSLHEHIANLAGSPAIKKGILQTVKVVDELVKVMGRHKPENIVIEMARENQTTQKGQKNSRERMKRIEEGIKELGSQILKEHPVENTQLQNEKLYLYYLQNGRDMYVDQELDINRLSDYDVDHIVPQSFLKDDSIDNKVLTRSDKNXGKSDNVPSEEVVKKMKNYWRQLLNAKLITQRKFDNLTKAERGGLSELDKAGFIKRQLVETRQITKHVAQILDSRMNTKYDENDKLIREVKVITLKSKLVSDFRKDFQFYKVREINNYHHAHDAYLNAVVGTALIKKYPKLESEFVYGDYKVYDVRKMIAKSEQEIGKATAKYFFYSNIMNFFKTEITLANGEIRKRPLIETNGETGEIVWDKGRDFATVRKVLSMPQVNIVKKTEVQTGGFSKESILPKRNSDKLIARKKDWDPKKYGGFDSPTVAYSVLVVAKVEKGKSKKLKSVKELLGITIMERSSFEKNPIDFLEAKGYKEVKKDLIIKLPKYSLFELENGRKRMLASAGELQKGNELALPSKYVNFLYLASHYEKLKGSPEDNEQKQLFVEQHKHYLDEIIEQISEFSKRVILADANLDKVLSAYNKHRDKPIREQAENIIHLFTLTNLGAPAAFKYFDTTIDRKRYTSTKEVLDATLIHQSITGLYETRIDLSQLGGD

SEQ ID NO: 109 - protein, 1368 aa, Streptococcus pyogenes
MDKKYSIGLDIGTNSVGWAVITDEYKVPSKKFKVLGNTDRHSIKKNLIGALLFDSGETAEATRLKRTARRRYTRRKNRICYLQEIFSNEMAKVDDSFFHRLEESFLVEEDKKHERHPIFGNIVDEVAYHEKYPTIYHLRKKLVDSTDKADLRLIYLALAHMIKFRGHFLIEGDLNPDNSDVDKLFIQLVQTYNQLFEENPINASGVDAKAILSARLSKSRRLENLIAQLPGEKKNGLFGNLIALSLGLTPNFKSNFDLAEDAKLQLSKDTYDDDLDNLLAQIGDQYADLFLAAKNLSDAILLSDILRVNTEITKAPLSASMIKRYDEHHQDLTLLKALVRQQLPEKYKEIFFDQSKNGYAGYIDGGASQEEFYKFIKPILEKMDGTEELLVKLNREDLLRKQRTFDNGSIPHQIHLGELHAILRRQEDFYPFLKDNREKIEKILTFRIPYYVGPLARGNSRFAWMTRKSEETITPWNFEEVVDKGASAQSFIERMTNFDKNLPNEKVLPKHSLLYEYFTVYNELTKVKYVTEGMRKPAFLSGEQKKAIVDLLFKTNRKVTVKQLKEDYFKKIECFDSVEISGVEDRFNASLGTYHDLLKIIKDKDFLDNEENEDILEDIVLTLTLFEDREMIEERLKTYAHLFDDKVMKQLKRRRYTGWGRLSRKLINGIRDKQSGKTILDFLKSDGFANRNFMQLIHDDSLTFKEDIQKAQVSGQGDSLHEHIANLAGSPAIKKGILQTVKVVDELVKVMGRHKPENIVIEMARENQTTQKGQKNSRERMKRIEEGIKELGSQILKEHPVENTQLQNEKLYLYYLQNGRDMYVDQELDINRLSDYDVDHIVPQSFLKDDSIDNKVLTRSDKNAGKSDNVPSEEVVKKMKNYWRQLLNAKLITQRKFDNLTKAERGGLSELDKAGFIKRQLVETRQITKHVAQILDSRMNTKYDENDKLIREVKVITLKSKLVSDFRKDFQFYKVREINNYHHAHDAYLNAVVGTALIKKYPKLESEFVYGDYKVYDVRKMIAKSEQEIGKATAKYFFYSNIMNFFKTEITLANGEIRKRPLIETNGETGEIVWDKGRDFATVRKVLSMPQVNIVKKTEVQTGGFSKESILPKRNSDKLIARKKDWDPKKYGGFDSPTVAYSVLVVAKVEKGKSKKLKSVKELLGITIMERSSFEKNPIDFLEAKGYKEVKKDLIIKLPKYSLFELENGRKRMLASAGELQKGNELALPSKYVNFLYLASHYEKLKGSPEDNEQKQLFVEQHKHYLDEIIEQISEFSKRVILADANLDKVLSAYNKHRDKPIREQAENIIHLFTLTNLGAPAAFKYFDTTIDRKRYTSTKEVLDATLIHQSITGLYETRIDLSQLGGD

SEQ ID NO: 110 - protein, 1367 aa, Streptococcus pyogenes
  misc_feature (839)..(839): Xaa can be any naturally occurring amino acid
DKKYSIGLDIGTNSVGWAVITDEYKVPSKKFKVLGNTDRHSIKKNLIGALLFDSGETAEATRLKRTARRRYTRRKNRICYLQEIFSNEMAKVDDSFFHRLEESFLVEEDKKHERHPIFGNIVDEVAYHEKYPTIYHLRKKLVDSTDKADLRLIYLALAHMIKFRGHFLIEGDLNPDNSDVDKLFIQLVQTYNQLFEENPINASGVDAKAILSARLSKSRRLENLIAQLPGEKKNGLFGNLIALSLGLTPNFKSNFDLAEDAKLQLSKDTYDDDLDNLLAQIGDQYADLFLAAKNLSDAILLSDILRVNTEITKAPLSASMIKRYDEHHQDLTLLKALVRQQLPEKYKEIFFDQSKNGYAGYIDGGASQEEFYKFIKPILEKMDGTEELLVKLNREDLLRKQRTFDNGSIPHQIHLGELHAILRRQEDFYPFLKDNREKIEKILTFRIPYYVGPLARGNSRFAWMTRKSEETITPWNFEEVVDKGASAQSFIERMTNFDKNLPNEKVLPKHSLLYEYFTVYNELTKVKYVTEGMRKPAFLSGEQKKAIVDLLFKTNRKVTVKQLKEDYFKKIECFDSVEISGVEDRFNASLGTYHDLLKIIKDKDFLDNEENEDILEDIVLTLTLFEDREMIEERLKTYAHLFDDKVMKQLKRRRYTGWGRLSRKLINGIRDKQSGKTILDFLKSDGFANRNFMQLIHDDSLTFKEDIQKAQVSGQGDSLHEHIANLAGSPAIKKGILQTVKVVDELVKVMGRHKPENIVIEMARENQTTQKGQKNSRERMKRIEEGIKELGSQILKEHPVENTQLQNEKLYLYYLQNGRDMYVDQELDINRLSDYDVDXIVPQSFLKDDSIDNKVLTRSDKNRGKSDNVPSEEVVKKMKNYWRQLLNAKLITQRKFDNLTKAERGGLSELDKAGFIKRQLVETRQITKHVAQILDSRMNTKYDENDKLIREVKVITLKSKLVSDFRKDFQFYKVREINNYHHAHDAYLNAVVGTALIKKYPKLESEFVYGDYKVYDVRKMIAKSEQEIGKATAKYFFYSNIMNFFKTEITLANGEIRKRPLIETNGETGEIVWDKGRDFATVRKVLSMPQVNIVKKTEVQTGGFSKESILPKRNSDKLIARKKDWDPKKYGGFDSPTVAYSVLVVAKVEKGKSKKLKSVKELLGITIMERSSFEKNPIDFLEAKGYKEVKKDLIIKLPKYSLFELENGRKRMLASAGELQKGNELALPSKYVNFLYLASHYEKLKGSPEDNEQKQLFVEQHKHYLDEIIEQISEFSKRVILADANLDKVLSAYNKHRDKPIREQAENIIHLFTLTNLGAPAAFKYFDTTIDRKRYTSTKEVLDATLIHQSITGLYETRIDLSQLGGD

SEQ ID NO: 111 - protein, 1367 aa, Streptococcus pyogenes
DKKYSIGLDIGTNSVGWAVITDEYKVPSKKFKVLGNTDRHSIKKNLIGALLFDSGETAEATRLKRTARRRYTRRKNRICYLQEIFSNEMAKVDDSFFHRLEESFLVEEDKKHERHPIFGNIVDEVAYHEKYPTIYHLRKKLVDSTDKADLRLIYLALAHMIKFRGHFLIEGDLNPDNSDVDKLFIQLVQTYNQLFEENPINASGVDAKAILSARLSKSRRLENLIAQLPGEKKNGLFGNLIALSLGLTPNFKSNFDLAEDAKLQLSKDTYDDDLDNLLAQIGDQYADLFLAAKNLSDAILLSDILRVNTEITKAPLSASMIKRYDEHHQDLTLLKALVRQQLPEKYKEIFFDQSKNGYAGYIDGGASQEEFYKFIKPILEKMDGTEELLVKLNREDLLRKQRTFDNGSIPHQIHLGELHAILRRQEDFYPFLKDNREKIEKILTFRIPYYVGPLARGNSRFAWMTRKSEETITPWNFEEVVDKGASAQSFIERMTNFDKNLPNEKVLPKHSLLYEYFTVYNELTKVKYVTEGMRKPAFLSGEQKKAIVDLLFKTNRKVTVKQLKEDYFKKIECFDSVEISGVEDRFNASLGTYHDLLKIIKDKDFLDNEENEDILEDIVLTLTLFEDREMIEERLKTYAHLFDDKVMKQLKRRRYTGWGRLSRKLINGIRDKQSGKTILDFLKSDGFANRNFMQLIHDDSLTFKEDIQKAQVSGQGDSLHEHIANLAGSPAIKKGILQTVKVVDELVKVMGRHKPENIVIEMARENQTTQKGQKNSRERMKRIEEGIKELGSQILKEHPVENTQLQNEKLYLYYLQNGRDMYVDQELDINRLSDYDVDAIVPQSFLKDDSIDNKVLTRSDKNRGKSDNVPSEEVVKKMKNYWRQLLNAKLITQRKFDNLTKAERGGLSELDKAGFIKRQLVETRQITKHVAQILDSRMNTKYDENDKLIREVKVITLKSKLVSDFRKDFQFYKVREINNYHHAHDAYLNAVVGTALIKKYPKLESEFVYGDYKVYDVRKMIAKSEQEIGKATAKYFFYSNIMNFFKTEITLANGEIRKRPLIETNGETGEIVWDKGRDFATVRKVLSMPQVNIVKKTEVQTGGFSKESILPKRNSDKLIARKKDWDPKKYGGFDSPTVAYSVLVVAKVEKGKSKKLKSVKELLGITIMERSSFEKNPIDFLEAKGYKEVKKDLIIKLPKYSLFELENGRKRMLASAGELQKGNELALPSKYVNFLYLASHYEKLKGSPEDNEQKQLFVEQHKHYLDEIIEQISEFSKRVILADANLDKVLSAYNKHRDKPIREQAENIIHLFTLTNLGAPAAFKYFDTTIDRKRYTSTKEVLDATLIHQSITGLYETRIDLSQLGGD

SEQ ID NO: 112 - protein, 1367 aa, Streptococcus pyogenes
  misc_feature (863)..(863): Xaa can be any naturally occurring amino acid
DKKYSIGLDIGTNSVGWAVITDEYKVPSKKFKVLGNTDRHSIKKNLIGALLFDSGETAEATRLKRTARRRYTRRKNRICYLQEIFSNEMAKVDDSFFHRLEESFLVEEDKKHERHPIFGNIVDEVAYHEKYPTIYHLRKKLVDSTDKADLRLIYLALAHMIKFRGHFLIEGDLNPDNSDVDKLFIQLVQTYNQLFEENPINASGVDAKAILSARLSKSRRLENLIAQLPGEKKNGLFGNLIALSLGLTPNFKSNFDLAEDAKLQLSKDTYDDDLDNLLAQIGDQYADLFLAAKNLSDAILLSDILRVNTEITKAPLSASMIKRYDEHHQDLTLLKALVRQQLPEKYKEIFFDQSKNGYAGYIDGGASQEEFYKFIKPILEKMDGTEELLVKLNREDLLRKQRTFDNGSIPHQIHLGELHAILRRQEDFYPFLKDNREKIEKILTFRIPYYVGPLARGNSRFAWMTRKSEETITPWNFEEVVDKGASAQSFIERMTNFDKNLPNEKVLPKHSLLYEYFTVYNELTKVKYVTEGMRKPAFLSGEQKKAIVDLLFKTNRKVTVKQLKEDYFKKIECFDSVEISGVEDRFNASLGTYHDLLKIIKDKDFLDNEENEDILEDIVLTLTLFEDREMIEERLKTYAHLFDDKVMKQLKRRRYTGWGRLSRKLINGIRDKQSGKTILDFLKSDGFANRNFMQLIHDDSLTFKEDIQKAQVSGQGDSLHEHIANLAGSPAIKKGILQTVKVVDELVKVMGRHKPENIVIEMARENQTTQKGQKNSRERMKRIEEGIKELGSQILKEHPVENTQLQNEKLYLYYLQNGRDMYVDQELDINRLSDYDVDHIVPQSFLKDDSIDNKVLTRSDKNXGKSDNVPSEEVVKKMKNYWRQLLNAKLITQRKFDNLTKAERGGLSELDKAGFIKRQLVETRQITKHVAQILDSRMNTKYDENDKLIREVKVITLKSKLVSDFRKDFQFYKVREINNYHHAHDAYLNAVVGTALIKKYPKLESEFVYGDYKVYDVRKMIAKSEQEIGKATAKYFFYSNIMNFFKTEITLANGEIRKRPLIETNGETGEIVWDKGRDFATVRKVLSMPQVNIVKKTEVQTGGFSKESILPKRNSDKLIARKKDWDPKKYGGFDSPTVAYSVLVVAKVEKGKSKKLKSVKELLGITIMERSSFEKNPIDFLEAKGYKEVKKDLIIKLPKYSLFELENGRKRMLASAGELQKGNELALPSKYVNFLYLASHYEKLKGSPEDNEQKQLFVEQHKHYLDEIIEQISEFSKRVILADANLDKVLSAYNKHRDKPIREQAENIIHLFTLTNLGAPAAFKYFDTTIDRKRYTSTKEVLDATLIHQSITGLYETRIDLSQLGGD

SEQ ID NO: 113 - protein, 1367 aa, Streptococcus pyogenes
DKKYSIGLDIGTNSVGWAVITDEYKVPSKKFKVLGNTDRHSIKKNLIGALLFDSGETAEATRLKRTARRRYTRRKNRICYLQEIFSNEMAKVDDSFFHRLEESFLVEEDKKHERHPIFGNIVDEVAYHEKYPTIYHLRKKLVDSTDKADLRLIYLALAHMIKFRGHFLIEGDLNPDNSDVDKLFIQLVQTYNQLFEENPINASGVDAKAILSARLSKSRRLENLIAQLPGEKKNGLFGNLIALSLGLTPNFKSNFDLAEDAKLQLSKDTYDDDLDNLLAQIGDQYADLFLAAKNLSDAILLSDILRVNTEITKAPLSASMIKRYDEHHQDLTLLKALVRQQLPEKYKEIFFDQSKNGYAGYIDGGASQEEFYKFIKPILEKMDGTEELLVKLNREDLLRKQRTFDNGSIPHQIHLGELHAILRRQEDFYPFLKDNREKIEKILTFRIPYYVGPLARGNSRFAWMTRKSEETITPWNFEEVVDKGASAQSFIERMTNFDKNLPNEKVLPKHSLLYEYFTVYNELTKVKYVTEGMRKPAFLSGEQKKAIVDLLFKTNRKVTVKQLKEDYFKKIECFDSVEISGVEDRFNASLGTYHDLLKIIKDKDFLDNEENEDILEDIVLTLTLFEDREMIEERLKTYAHLFDDKVMKQLKRRRYTGWGRLSRKLINGIRDKQSGKTILDFLKSDGFANRNFMQLIHDDSLTFKEDIQKAQVSGQGDSLHEHIANLAGSPAIKKGILQTVKVVDELVKVMGRHKPENIVIEMARENQTTQKGQKNSRERMKRIEEGIKELGSQILKEHPVENTQLQNEKLYLYYLQNGRDMYVDQELDINRLSDYDVDHIVPQSFLKDDSIDNKVLTRSDKNAGKSDNVPSEEVVKKMKNYWRQLLNAKLITQRKFDNLTKAERGGLSELDKAGFIKRQLVETRQITKHVAQILDSRMNTKYDENDKLIREVKVITLKSKLVSDFRKDFQFYKVREINNYHHAHDAYLNAVVGTALIKKYPKLESEFVYGDYKVYDVRKMIAKSEQEIGKATAKYFFYSNIMNFFKTEITLANGEIRKRPLIETNGETGEIVWDKGRDFATVRKVLSMPQVNIVKKTEVQTGGFSKESILPKRNSDKLIARKKDWDPKKYGGFDSPTVAYSVLVVAKVEKGKSKKLKSVKELLGITIMERSSFEKNPIDFLEAKGYKEVKKDLIIKLPKYSLFELENGRKRMLASAGELQKGNELALPSKYVNFLYLASHYEKLKGSPEDNEQKQLFVEQHKHYLDEIIEQISEFSKRVILADANLDKVLSAYNKHRDKPIREQAENIIHLFTLTNLGAPAAFKYFDTTIDRKRYTSTKEVLDATLIHQSITGLYETRIDLSQLGGD

SEQ ID NO: 114 - protein, 1053 aa, Staphylococcus aureus; identical to SEQ ID NO: 84

SEQ ID NO: 115 - protein, 1082 aa, Neisseria meningitidis
MAAFKPNSINYILGLDIGIASVGWAMVEIDEEENPIRLIDLGVRVFERAEVPKTGDSLAMARRLARSVRRLTRRRAHRLLRTRRLLKREGVLQAANFDENGLIKSLPNTPWQLRAAALDRKLTPLEWSAVLLHLIKHRGYLSQRKNEGETADKELGALLKGVAGNAHALQTGDFRTPAELALNKFEKESGHIRNQRSDYSHTFSRKDLQAELILLFEKQKEFGNPHVSGGLKEGIETLLMTQRPALSGDAVQKMLGHCTFEPAEPKAAKNTYTAERFIWLTKLNNLRILEQGSERPLTDTERATLMDEPYRKSKLTYAQARKLLGLEDTAFFKGLRYGKDNAEASTLMEMKAYHAISRALEKEGLKDKKSPLNLSPELQDEIGTAFSLFKTDEDITGRLKDRIQPEILEALLKHISFDKFVQISLKALRRIVPLMEQGKRYDEACAEIYGDHYGKKNTEEKIYLPPIPADEIRNPVVLRALSQARKVINGVVRRYGSPARIHIETAREVGKSFKDRKEIEKRQEENRKDREKAAAKFREYFPNFVGEPKSKDILKLRLYEQQHGKCLYSGKEINLGRLNEKGYVEIDAALPFSRTWDDSFNNKVLVLGSENQNKGNQTPYEYFNGKDNSREWQEFKARVETSRFPRSKKQRILLQKFDEDGFKERNLNDTRYVNRFLCQFVADRMRLTGKGKKRVFASNGQITNLLRGFWGLRKVRAENDRHHALDAVVVACSTVAMQQKITRFVRYKEMNAFDGKTIDKETGEVLHQKTHFPQPWEFFAQEVMIRVFGKPDGKPEFEEADTLEKLRTLLAEKLSSRPEAVHEYVTPLFVSRAPNRKMSGQGHMETVKSAKRLDEGVSVLRVPLTQLKLKDLEKMVNREREPKLYEALKARLEAHKDDPAKAFAEPFYKYDKAGNRTQQVKAVRVEQVQKTGVWVRNHNGIADNATMVRVDVFEKGDKYYLVPIYSWQVAKGILPDRAVVQGKDEEDWQLIDDSFNFKFSLHPNDLVEVITKKARMFGYFASCHRGTGNINIRIHDLDHKIGKNGILEGIGVKTALSFQKYQIDELGKEIRPCRLKKRPPVR

SEQ ID NO: 116 - protein, 984 aa, Campylobacter jejuni
MARILAFDIGISSIGWAFSENDELKDCGVRIFTKVENPKTGESLALPRRLARSARKRLARRKARLNHLKHLIANEFKLNYEDYQSFDESLAKAYKGSLISPYELRFRALNELLSKQDFARVILHIAKRRGYDDIKNSDDKEKGAILKAIKQNEEKLANYQSVGEYLYKEYFQKFKENSKEFTNVRNKKESYERCIAQSFLKDELKLIFKKQREFGFSFSKKFEEEVLSVAFYKRALKDFSHLVGNCSFFTDEKRAPKNSPLAFMFVALTRIINLLNNLKNTEGILYTKDDLNALLNEVLKNGTLTYKQTKKLLGLSDDYEFKGEKGTYFIEFKKYKEFIKALGEHNLSQDDLNEIAKDITLIKDEIKLKKALAKYDLNQNQIDSLSKLEFKDHLNISFKALKLVTPLMLEGKKYDEACNELNLKVAINEDKKDFLPAFNETYYKDEVTNPVVLRAIKEYRKVLNALLKKYGKVHKINIELAREVGKNHSQRAKIEKEQNENYKAKKDAELECEKLGLKINSKNILKLRLFKEQKEFCAYSGEKIKISDLQDEKMLEIDHIYPYSRSFDDSYMNKVLVFTKQNQEKLNQTPFEAFGNDSAKWQKIEVLAKNLPTKKQKRILDKNYKDKEQKNFKDRNLNDTRYIARLVLNYTKDYLDFLPLSDDENTKLNDTQKGSKVHVEAKSGMLTSALRHTWGFSAKDRNNHLHHAIDAVIIAYANNSIVKAFSDFKKEQESNSAELYAKKISELDYKNKRKFFEPFSGFRQKVLDKIDEIFVSKPERKKPSGALHEETFRKEEEFYQSYGGKEGVLKALELGKIRKVNGKIVKNGDMFRVDIFKHKKTNKFYAVPIYTMDFALKVLPNKAVARSKKGEIKDWILMDENYEFCFSLYKDSLILIQTKDMQEPEFVYYNAFTSSTVSLIVSKHDNKFETLSKNQKILFKNANEKEVIAKSIGIQNLKVFEKYIVSALGEVTKAEFRQREDFKK

SEQ ID NO: 117 - protein, 1087 aa, Geobacillus stearothermophilus
MRYKIGLDIGITSVGWAVMNLDIPRIEDLGVRIFDRAENPQTGESLALPRRLARSARRRLRRRKHRLERIRRLVIREGILTKEELDKLFEEKHEIDVWQLRVEALDRKLNNDELARVLLHLAKRRGFKSNRKSERSNKENSTMLKHIEENRAILSSYRTVGEMIVKDPKFALHKRNKGENYTNTIARDDLEREIRLIFSKQREFGNMSCTEEFENEYITIWASQRPVASKDDIEKKVGFCTFEPKEKRAPKATYTFQSFIAWEHINKLRLISPSGARGLTDEERRLLYEQAFQKNKITYHDIRTLLHLPDDTYFKGIVYDRGESRKQNENIRFLELDAYHQIRKAVDKVYGKGKSSSFLPIDFDTFGYALTLFKDDADIHSYLRNEYEQNGKRMPNLANKVYDNELIEELLNLSFTKFGHLSLKALRSILPYMEQGEVYSSACERAGYTFTGPKKKQKTMLLPNIPPIANPVVMRALTQARKVVNAIIKKYGSPVSIHIELARDLSQTFDERRKTKKEQDENRKKNETAIRQLMEYGLTLNPTGHDIVKFKLWSEQNGRCAYSLQPIEIERLLEPGYVEVDHVIPYSRSLDDSYTNKVLVLTRENREKGNRIPAEYLGVGTERWQQFETFVLTNKQFSKKKRDRLLRLHYDENEETEFKNRNLNDTRYISRFFANFIREHLKFAESDDKQKVYTVNGRVTAHLRSRWEFNKNREESDLHHAVDAVIVACTTPSDIAKVTAFYQRREQNKELAKKTEPHFPQPWPHFADELRARLSKHPKESIKALNLGNYDDQKLESLQPVFVSRMPKRSVTGAAHQETLRRYVGIDERSGKIQTVVKTKLSEIKLDASGHFPMYGKESDPRTYEAIRQRLLEHNNDPKKAFQEPLYKPKKNGEPGPVIRTVKIIDTKNQVIPLNDGKTVAYNSNIVRVDVFEKDGKYYCVPVYTMDIMKGILPNKAIEPNKPYSEWKEMTEDYTFRFSLYPNDLIRIELPREKTVKTAAGEEINVKDVFVYYKTIDSANGGLELISHDHRFSLRGVGSRTLKRFEKYQVDVLGNIYKVRGEKRVGLASSAHSKPGKTIRPLQSTRD

SEQ ID NO: 118 - protein, 1228 aa, Unknown
  Lachnospiraceae bacterium
MSKLEKFTNCYSLSKTLRFKAIPVGKTQENIDNKRLLVEDEKRAEDYKGVKKLLDRYYLSFINDVLHSIKLKNLNNYISLFRKKTRTEKENKELENLEINLRKEIAKAFKGNEGYKSLFKKDIIETILPEFLDDKDEIALVNSFNGFTTAFTGFFDNRENMFSEEAKSTSIAFRCINENLTRYISNMDIFEKVDAIFDKHEVQEIKEKILNSDYDVEDFFEGEFFNFVLTQEGIDVYNAIIGGFVTESGEKIKGLNEYINLYNQKTKQKLPKFKPLYKQVLSDRESLSFYGEGYTSDEEVLEVFRNTLNKNSEIFSSIKKLEKLFKNFDEYSSAGIFVKNGPAISTISKDIFGEWNVIRDKWNAEYDDIHLKKKAVVTEKYEDDRRKSFKKIGSFSLEQLQEYADADLSVVEKLKEIIIQKVDEIYKVYGSSEKLFDADFVLEKSLKKNDAVVAIMKDLLDSVKSFENYIKAFFGEGKETNRDESFYGDFVLAYDILLKVDHIYDAIRNYVTQKPYSKDKFKLYFQNPQFMGGWDKDKETDYRATILRYGSKYYLAIMDKKYAKCLQKIDKDDVNGNYEKINYKLLPGPNKMLPKVFFSKKWMAYYNPSEDIQKIYKNGTFKKGDMFNLNDCHKLIDFFKDSISRYPKWSNAYDFNFSETEKYKDIAGFYREVEEQGYKVSFESASKKEVDKLVEEGKLYMFQIYNKDFSDKSHGTPNLHTMYFKLLFDENNHGQIRLSGGAELFMRRASLKKEELVVHPANSPIANKNPDNPKKTTTLSYDVYKDKRFSEDQYELHIPIAINKCPKNIFKINTEVRVLLKHDDNPYVIGIDRGERNLLYIVVVDGKGNIVEQYSLNEIINNFNGIRIKTDYHSLLDKKEKERFEARQNWTSIENIKELKAGYISQVVHKICELVEKYDAVIALEDLNSGFKNSRVKVEKQVYQKFEKMLIDKLNYMVDKKSNPCATGGALKGYQITNKFESFKSMSTQNGFIFYIPAWLTSKIDPSTGFVNLLKTKYTSIADSKKFISSFDRIMYVPEEDLFEFALDYKNFSRTDADYIKKWKLYSYGNRIRIFRNPKKNNVFDWEEVCLTSAYKELFNKYGINYQQGDIRALLCEQSDKAFYSSFMALMSLMLQMRNSITGRTDVDFLISPVKNSDGIFYDSRNYEAQENAILPKNADANGAYNIARKVLWAIGQFKKAEDEKLDKVKIAISNKEWLEYAQTSVKH

SEQ ID NO: 119 - protein, 1108 aa, Bacillus hisashii
MATRSFILKIEPNEEVKKGLWKTHEVLNHGIAYYMNILKLIRQEAIYEHHEQDPKNPKKVSKAEIQAELWDFVLKMQKCNSFTHEVDKDEVFNILRELYEELVPSSVEKKGEANQLSNKFLYPLVDPNSQSGKGTASSGRKPRWYNLKIAGDPSWEEEKKKWEEDKKKDPLAKILGKLAEYGLIPLFIPYTDSNEPIVKEIKWMEKSRNQSVRRLDKDMFIQALERFLSWESWNLKVKEEYEKVEKEYKTLEERIKEDIQALKALEQYEKERQEQLLRDTLNTNEYRLSKRGLRGWREIIQKWLKMDENEPSEKYLEVFKDYQRKHPREAGDYSVYEFLSKKENHFIWRNHPEYPYLYATFCEIDKKKKDAKQQATFTLADPINHPLWVRFEERSGSNLNKYRILTEQLHTEKLKKKLTVQLDRLIYPTESGGWEEKGKVDIVLLPSRQFYNQIFLDIEEKGKHAFTYKDESIKFPLKGTLGGARVQFDRDHLRRYPHKVESGNVGRIYFNMTVNIEPTESPVSKSLKIHRDDFPKVVNFKPKELTEWIKDSKGKKLKSGIESLEIGLRVMSIDLGQRQAAAASIFEVVDQKPDIEGKLFFPIKGTELYAVHRASFNIKLPGETLVKSREVLRKAREDNLKLMNQKLNFLRNVLHFQQFEDITEREKRVTKWISRQENSDVPLVYQDELIQIRELMYKPYKDWVAFLKQLHKRLEVEIGKEVKHWRKSLSDGRKGLYGISLKNIDEIDRTRKFLLRWSLRPTEPGEVRRLEPGQRFAIDQLNHLNALKEDRLKKMANTIIMHALGYCYDVRKKKWQAKNPACQIILFEDLSNYNPYEERSRFENSKLMKWSRREIPRQVALQGEIYGLQVGEVGAQFSSRFHAKTGSPGIRCSVVTKEKLQDNRFFKNLQREGRLTLDKIAVLKEGDLYPDKGGEKFISLSKDRKCVTTHADINAAQNLQKRFWTRTHGFYKVYCKAYQVDGQTVYIPESKDQKQKIIEEFGEGYFILKDGVYEWVNAGKLKIKKGSSKQSSSELVDSDILKDSFDLASELKGEKLMLYRDPSGNVFPSDKWMAAGVFFGKLERILISKLTNQYSISTIEDDSSKQSM

SEQ ID NO: 120 - protein, 1307 aa, Acidaminococcus sp
MTQFEGFTNLYQVSKTLRFELIPQGKTLKHIQEQGFIEEDKARNDHYKELKPIIDRIYKTYADQCLQLVQLDWENLSAAIDSYRKEKTEETRNALIEEQATYRNAIHDYFIGRTDNLTDAINKRHAEIYKGLFKAELFNGKVLKQLGTVTTTEHENALLRSFDKFTTYFSGFYENRKNVFSAEDISTAIPHRIVQDNFPKFKENCHIFTRLITAVPSLREHFENVKKAIGIFVSTSIEEVFSFPFYNQLLTQTQIDLYNQLLGGISREAGTEKIKGLNEVLNLAIQKNDETAHIIASLPHRFIPLFKQILSDRNTLSFILEEFKSDEEVIQSFCKYKTLLRNENVLETAEALFNELNSIDLTHIFISHKKLETISSALCDHWDTLRNALYERRISELTGKITKSAKEKVQRSLKHEDINLQEIISAAGKELSEAFKQKTSEILSHAHAALDQPLPTTLKKQEEKEILKSQLDSLLGLYHLLDWFAVDESNEVDPEFSARLTGIKLEMEPSLSFYNKARNYATKKPYSVEKFKLNFQMPTLASGWDVNKEKNNGAILFVKNGLYYLGIMPKQKGRYKALSFEPTEKTSEGFDKMYYDYFPDAAKMIPKCSTQLKAVTAHFQTHTTPILLSNNFIEPLEITKEIYDLNNPEKEPKKFQTAYAKKTGDQKGYREALCKWIDFTRDFLSKYTKTTSIDLSSLRPSSQYKDLGEYYAELNPLLYHISFQRIAEKEIMDAVETGKLYLFQIYNKDFAKGHHGKPNLHTLYWTGLFSPENLAKTSIKLNGQAELFYRPKSRMKRMAHRLGEKMLNKKLKDQKTPIPDTLYQELYDYVNHRLSHDLSDEARALLPNVITKEVSHEIIKDRRFTSDKFFFHVPITLNYQAANSPSKFNQRVNAYLKEHPETPIIGIDRGERNLIYITVIDSTGKILEQRSLNTIQQFDYQKKLDNREKERVAARQAWSVVGTIKDLKQGYLSQVIHEIVDLMIHYQAVVVLENLNFGFKSKRTGIAEKAVYQQFEKMLIDKLNCLVLKDYPAEKVGGVLNPYQLTDQFTSFAKMGTQSGFLFYVPAPYTSKIDPLTGFVDPFVWKTIKNHESRKHFLEGFDFLHYDVKTGDFILHFKMNRNLSFQRGLPGFMPAWDIVFEKNETQFDAKGTPFIAGKRIVPVIENHRFTGRYRDLYPANELIALLEEKGIVFRDGSNILPKLLENDDSHAIDTMVALIRSVLQMRNSNAATGEDYINSPVRDLNGVCFDSRFQNPEWPMDADANGAYHIALKGQLLLNHLKESKDLKLQNGISNQDWLAYIQELRN

SEQ ID NO: 121 - protein, 1307 aa, Artificial Sequence
  Synthetic
MTQFEGFTNLYQVSKTLRFELIPQGKTLKHIQEQGFIEEDKARNDHYKELKPIIDRIYKTYADQCLQLVQLDWENLSAAIDSYRKEKTEETRNALIEEQATYRNAIHDYFIGRTDNLTDAINKRHAEIYKGLFKAELFNGKVLKQLGTVTTTEHENALLRSFDKFTTYFSGFYENRKNVFSAEDISTAIPHRIVQDNFPKFKENCHIFTRLITAVPSLREHFENVKKAIGIFVSTSIEEVFSFPFYNQLLTQTQIDLYNQLLGGISREAGTEKIKGLNEVLNLAIQKNDETAHIIASLPHRFIPLFKQILSDRNTLSFILEEFKSDEEVIQSFCKYKTLLRNENVLETAEALFNELNSIDLTHIFISHKKLETISSALCDHWDTLRNALYERRISELTGKITKSAKEKVQRSLKHEDINLQEIISAAGKELSEAFKQKTSEILSHAHAALDQPLPTTLKKQEEKEILKSQLDSLLGLYHLLDWFAVDESNEVDPEFSARLTGIKLEMEPSLSFYNKARNYATKKPYSVEKFKLNFQMPTLASGWDVNKEKNNGAILFVKNGLYYLGIMPKQKGRYKALSFEPTEKTSEGFDKMYYDYFPDAAKMIPKCSTQLKAVTAHFQTHTTPILLSNNFIEPLEITKEIYDLNNPEKEPKKFQTAYAKKTGDQKGYREALCKWIDFTRDFLSKYTKTTSIDLSSLRPSSQYKDLGEYYAELNPLLYHISFQRIAEKEIMDAVETGKLYLFQIYNKDFAKGHHGKPNLHTLYWTGLFSPENLAKTSIKLNGQAELFYRPKSRMKRMAHRLGEKMLNKKLKDQKTPIPDTLYQELYDYVNHRLSHDLSDEARALLPNVITKEVSHEIIKDRRFTSDKFFFHVPITLNYQAANSPSKFNQRVNAYLKEHPETPIIGIDRGERNLIYITVIDSTGKILEQRSLNTIQQFDYQKKLDNREKERVAARQAWSVVGTIKDLKQGYLSQVIHEIVDLMIHYQAVVVLENLNFGFKSKRTGIAEKAVYQQFEKMLIDKLNCLVLKDYPAEKVGGVLNPYQLTDQFTSFAKMGTQSGFLFYVPAPYTSKIDPLTGFVDPFVWKTIKNHESRKHFLEGFDFLHYDVKTGDFILHFKMNRNLSFQRGLPGFMPAWDIVFEKNETQFDAKGTPFIAGKRIVPVIENHRFTGRYRDLYPANELIALLEEKGIVFRDGSNILPKLLENDDSHAIDTMVALIRSVLQMANSNAATGEDYINSPVRDLNGVCFDSRFQNPEWPMDADANGAYHIALKGQLLLNHLKESKDLKLQNGISNQDWLAYIQELRN

SEQ ID NO: 122 - protein, 1259 aa, Unknown
  Lachnospiraceae bacterium
MNYKTGLEDFIGKESLSKTLRNALIPTESTKIHMEEMGVIRDDELRAEKQQELKEIMDDYYRTFIEEKLGQIQGIQWNSLFQKMEETMEDISVRKDLDKIQNEKRKEICCYFTSDKRFKDLFNAKLITDILPNFIKDNKEYTEEEKAEKEQTRVLFQRFATAFTNYFNQRRNNFSEDNISTAISFRIVNENSEIHLQNMRAFQRIEQQYPEEVCGMEEEYKDMLQEWQMKHIYSVDFYDRELTQPGIEYYNGICGKINEHMNQFCQKNRINKNDFRMKKLHKQILCKKSSYYEIPFRFESDQEVYDALNEFIKTMKKKEIIRRCVHLGQECDDYDLGKIYISSNKYEQISNALYGSWDTIRKCIKEEYMDALPGKGEKKEEKAEAAAKKEEYRSIADIDKIISLYGSEMDRTISAKKCITEICDMAGQISIDPLVCNSDIKLLQNKEKTTEIKTILDSFLHVYQWGQTFIVSDIIEKDSYFYSELEDVLEDFEGITTLYNHVRSYVTQKPYSTVKFKLHFGSPTLANGWSQSKEYDNNAILLMRDQKFYLGIFNVRNKPDKQIIKGHEKEEKGDYKKMIYNLLPGPSKMLPKVFITSRSGQETYKPSKHILDGYNEKRHIKSSPKFDLGYCWDLIDYYKECIHKHPDWKNYDFHFSDTKDYEDISGFYREVEMQGYQIKWTYISADEIQKLDEKGQIFLFQIYNKDFSVHSTGKDNLHTMYLKNLFSEENLKDIVLKLNGEAELFFRKASIKTPIVHKKGSVLVNRSYTQTVGNKEIRVSIPEEYYTEIYNYLNHIGKGKLSSEAQRYLDEGKIKSFTATKDIVKNYRYCCDHYFLHLPITINFKAKSDVAVNERTLAYIAKKEDIHIIGIDRGERNLLYISVVDVHGNIREQRSFNIVNGYDYQQKLKDREKSRDAARKNWEEIEKIKELKEGYLSMVIHYIAQLVVKYNAVVAMEDLNYGFKTGRFKVERQVYQKFETMLIEKLHYLVFKDREVCEEGGVLRGYQLTYIPESLKKVGKQCGFIFYVPAGYTSKIDPTTGFVNLFSFKNLTNRESRQDFVGKFDEIRYDRDKKMFEFSFDYNNYIKKGTILASTKWKVYTNGTRLKRIVVNGKYTSQSMEVELTDAMEKMLQRAGIEYHDGKDLKGQIVEKGIEAEIIDIFRLTVQMRNSRSESEDREYDRLISPVLNDKGEFFDTATADKTLPQDADANGAYCIALKGLYEVKQIKENWKENEQFPRNKLVQDNKTWFDFMQKKRYL

SEQ ID NO: 123 - protein, 1306 aa, Prevotella copri
MAKNFEDFKRLYSLSKTLRFEAKPIGATLDNIVKSGLLDEDEHRAASYVKVKKLIDEYHKVFIDRVLDDGCLPLENKGNNNSLAEYYESYVSRAQDEDAKKKFKEIQQNLRSVIAKKLTEDKAYANLFGNKLIESYKDKEDKKKIIDSDLIQFINTAESTQLDSMSQDEAKELVKEFWGFVTYFYGFFDNRKNMYTAEEKSTGIAYRLVNENLPKFIDNIEAFNRAITRPEIQENMGVLYSDFSEYLNVESIQEMFQLDYYNMLLTQKQIDVYNAIIGGKTDDEHDVKIKGINEYINLYNQQHKDDKLPKLKALFKQILSDRNAISWLPEEFNSDQEVLNAIKDCYERLAENVLGDKVLKSLLGSLADYSLDGIFIRNDLQLTDISQKMFGNWGVIQNAIMQNIKRVAPARKHKESEEDYEKRIAGIFKKADSFSISYINDCLNEADPNNAYFVENYFATFGAVNTPTMQRENLFALVQNAYTEVAALLHSDYPTVKHLAQDKANVSKIKALLDAIKSLQHFVKPLLGKGDESDKDERFYGELASLWAELDTVTPLYNMIRNYMTRKPYSQKKIKLNFENPQLLGGWDANKEKDYATIILRRNGLYYLAIMDKDSRKLLGKAMPSDGECYEKMVYKFFKDVTTMIPKCSTQLKDVQAYFKVNTDDYVLNSKAFNKPLTITKEVFDLNNVLYGKYKKFQKGYLTATGDNVGYTHAVNVWIKFCMDFLNSYDSTCIYDFSSLKPESYLSLDAFYQDANLLLYKLSFARASVSYINQLVEEGKMYLFQIYNKDFSEYSKGTPNMHTLYWKALFDERNLADVVYKLNGQAEMFYRKKSIENTHPTHPANHPILNKNKDNKKKESLFDYDLIKDRRYTVDKFMFHVPITMNFKSVGSENINQDVKAYLRHADDMHIIGIDRGERHLLYLVVIDLQGNIKEQYSLNEIVNEYNGNTYHTNYHDLLDVREEERLKARQSWQTIENIKELKEGYLSQVIHKITQLMVRYHAIVVLEDLSKGFMRSRQKVEKQVYQKFEKMLIDKLNYLVDKKTDVSTPGGLLNAYQLTCKSDSSQKLGKQSGFLFYIPAWNTSKIDPVTGFVNLLDTHSLNSKEKIKAFFSKFDAIRYNKDKKWFEFNLDYDKFGKKAEDTRTKWTLCTRGMRIDTFRNKEKNSQWDNQEVDLTTEMKSLLEHYYIDIHGNLKDAISAQTDKAFFTGLLHILKLTLQMRNSITGTETDYLVSPVADENGIFYDSRSCGNQLPENADANGAYNIARKGLMLIEQIKNAEDLNNVKFDISNKAWLNFAQQKPYKNG

SEQ ID NO: 124 - protein, 1142 aa, Eubacterium rectale
MFSAKLISDILPEFVIHNNNYSASEKEEKTQVIKLFSRFATSFKDYFKNRANCFSANDISSSSCHRIVNDNAEIFFSNALVYRRIVKNLSNDDINKISGDMKDSLKEMSLEEIYSYEKYGEFITQEGISFYNDICGKVNLFMNLYCQKNKENKNLYKLRKLHKQILCIADTSYEVPYKFESDEEVYQSVNGFLDNISSKHIVERLRKIGENYNGYNLDKIYIVSKFYESVSQKTYRDWETINTALEIHYNNILPGNGKSKADKVKKAVKNDLQKSITEINELVSNYKLCPDDNIKAETYIHEISHILNNFEAQELKYNPEIHLVESELKASELKNVLDVIMNAFHWCSVFMTEELVDKDNNFYAELEEIYDEIYPVISLYNLVRNYVTQKPYSTKKIKLNFGIPTLADGWSKSKEYSNNAIILMRDNLYYLGIFNAKNKPDKKIIEGNTSENKGDYKKMIYNLLPGPNKMIPKVFLSSKTGVETYKPSAYILEGYKQNKHLKSSKDFDITFCHDLIDYFKNCIAIHPEWKNFGFDFSDTSTYEDISGFYREVELQGYKIDWTYISEKDIDLLQEKGQLYLFQIYNKDFSKKSSGNDNLHTMYLKNLFSEENLKDIVLKLNGEAEIFFRKSSIKNPIIHKKGSILVNRTYEAEEKDQFGNIQIVRKTIPENIYQELYKYFNDKSDKELSDEAAKLKNVVGHHEAATNIVKDYRYTYDKYFLHMPITINFKANKTSFINDRILQYIAKEKDLHVIGIDRGERNLIYVSVIDTCGNIVEQKSFNIVNGYDYQIKLKQQEGARQIARKEWKEIGKIKEIKEGYLSLVIHEISKMVIKYNAIIAMEDLSYGFKKGRFKVERQVYQKFETMLINKLNYLVFKDISITENGGLLKGYQLTYIPDKLKNVGHQCGCIFYVPAAYTSKIDPTTGFVNIFKFKDLTVDAKREFIKKFDSIRYDSDKNLFCFTFDYNNFITQNTVMSKSSWSVYTYGVRIKRRFVNGRFSNESDTIDITKDMEKTLEMTDINWRDGHDLRQDIIDYEIVQHIFEIFKLTVQMRNSLSELEDRDYDRLISPVLNENNIFYDSAKAGDALPKDADANGAYCIALKGLYEIKQITENWKEDGKFSRDKLKISNKDWFDFIQNKRYL

SEQ ID NO: 125 - protein, 1259 aa, Unknown
  Lachnospiraceae bacterium
MNYKTGLEDFIGKESLSKTLRNALIPTESTKIHMEEMGVIRDDELRAEKQQELKEIMDDYYRAFIEEKLGQIQGIQWNSLFQKMEETMEDISVRKDLDKIQNEKRKEICCYFTSDKRFKDLFNAKLITDILPNFIKDNKEYTEEEKAEKEQTRVLFQRFATAFTNYFNQRRNNFSEDNISTAISFRIVNENSEIHLQNMRAFQRIEQQYPEEVCGMEEEYKDMLQEWQMKHIYLVDFYDRVLTQPGIEYYNGICGKINEHMNQFCQKNRINKNDFRMKKLHKQILCKKSSYYEIPFRFESDQEVYDALNEFIKTMKEKEIICRCVHLGQKCDDYDLGKIYISSNKYEQISNALYGSWDTIRKCIKEEYMDALPGKGEKKEEKAEAAAKKEEYRSIADIDKIISLYGSEMDRTISAKKCITEICDMAGQISTDPLVCNSDIKLLQNKEKTTEIKTILDSFLHVYQWGQTFIVSDIIEKDSYFYSELEDVLEDFEGITTLYNHVRSYVTQKPYSTVKFKLHFGSPTLANGWSQSKEYDNNAILLMRDQKFYLGIFNVRNKPDKQIIKGHEKEEKGDYKKMIYNLLPGPSKMLPKVFITSRSGQETYKPSKHILDGYNEKRHIKSSPKFDLGYCWDLIDYYKECIHKHPDWKNYDFHFSDTKDYEDISGFYREVEMQGYQIKWTYISADEIQKLDEKGQIFLFQIYNKDFSVHSTGKDNLHTMYLKNLFSEENLKDIVLKLNGEAELFFRKASIKTPVVHKKGSVLVNRSYTQTVGDKEIRVSIPEEYYTEIYNYLNHIGRGKLSTEAQRYLEERKIKSFTATKDIVKNYRYCCDHYFLHLPITINFKAKSDIAVNERTLAYIAKKEDIHIIGIDRGERNLLYISVVDVHGNIREQRSFNIVNGYDYQQKLKDREKSRDAARKNWEEIEKIKELKEGYLSMVIHYIAQLVVKYNAVVAMEDLNYGFKTGRFKVERQVYQKFETMLIEKLHYLVFKDREVCEEGGVLRGYQLTYIPESLKKVGKQCGFIFYVPAGYTSKIDPTTGFVNLFSFKNLTNRESRQDFVGKFDEIRYDRDKKMFEFSFDYNNYIKKGTMLASTKWKVYTNGTRLKRIVVNGKYTSQSMEVELTDAMEKMLQRAGIEYHDGKDLKGQIVEKGIEAEIIDIFRLTVQMRNSRSESEDREYDRLISPVLNDKGEFFDTATADKTLPQDADANGAYCIALKGLYEVKQIKENWKENEQFPRNKLVQDNKTWFDFMQKKRYL

SEQ ID NO: 126 - protein, 1108 aa, Bacillus hisashii; identical to SEQ ID NO: 119

SEQ ID NO: 127 - protein, 1465 aa, Thermomonas hydrothermalis
MSEKTTQRAYTLRLNRASGECAVCQNNSCDCWHDALWATHKAVNRGAKAFGDWLLTLRGGLCHTLVEMEVPAKGNNPPQRPTDQERRDRRVLLALSWLSVEDEHGAPKEFIVATGRDSADDRAKKVEEKLREILEKRDFQEHEIDAWLQDCGPSLKAHIREDAVWVNRRALFDAAVERIKTLTWEEAWDFLEPFFGTQYFAGIGDGKDKDDAEGPARQGEKAKDLVQKAGQWLSARFGIGTGADFMSMAEAYEKIAKWASQAQNGDNGKATIEKLACALRPSEPPTLDTVLKCISGPGHKSATREYLKTLDKKSTVTQEDLNQLRKLADEDARNCRKKVGKKGKKPWADEVLKDVENSCELTYLQDNSPARHREFSVMLDHAARRVSMAHSWIKKAEQRRRQFESDAQKLKNLQERAPSAVEWLDRFCESRSMTTGANTGSGYRIRKRAIEGWSYVVQAWAEASCDTEDKRIAAARKVQADPEIEKFGDIQLFEALAADEAICVWRDQEGTQNPSILIDYVTGKTAEHNQKRFKVPAYRHPDELRHPVFCDFGNSRWSIQFAIHKEIRDRDKGAKQDTRQLQNRHGLKMRLWNGRSMTDVNLHWSSKRLTADLALDQNPNPNPTEVTRADRLGRAASSAFDHVKIKNVFNEKEWNGRLQAPRAELDRIAKLEEQGKTEQAEKLRKRLRWYVSFSPCLSPSGPFIVYAGQHNIQPKRSGQYAPHAQANKGRARLAQLILSRLPDLRILSVDLGHRFAAACAVWETLSSDAFRREIQGLNVLAGGSGEGDLFLHVEMTGDDGKRRTVVYRRIGPDQLLDNTPHPAPWARLDRQFLIKLQGEDEGVREASNEELWTVHKLEVEVGRTVPLIDRMVRSGFGKTEKQKERLKKLRELGWISAMPNEPSAETDEKEGEIRSISRSVDELMSSALGTLRLALKRHGNRARIAFAMTADYKPMPGGQKYYFHEAKEASKNDDETKRRDNQIEFLQDALSLWHDLFSSPDWEDNEAKKLWQNHIATLPNYQTPEEISAELKRVERNKKRKENRDKLRTAAKALAENDQLRQHLHDTWKERWESDDQQWKERLRSLKDWIFPRGKAEDNPSIRHVGGLSITRINTISGLYQILKAFKMRPEPDDLRKNIPQKGDDELENFNRRLLEARDRLREQRVKQLASRIIEAALGVGRIKIPKNGKLPKRPRTTVDTPCHAVVIESLKTYRPDDLRTRRENRQLMQWSSAKVRKYLKEGCELYGLHFLEVPANYTSRQCSRTGLPGIRCDDVPTGDFLKAPWWRRAINTAREKNGGDAKDRFLVDLYDHLNNLQSKGEALPATVRVPRQGGNLFIAGAQLDDTNKERRAIQADLNAAANIGLRALLDPDWRGRWWYVPCKDGTSEPALDRIEGSTAFNDVRSLPTGDNSSRRAPREIENLWRDPSGDSLESGTWSPTRAYWDTVQSRVIELLRRHAGLPTS

SEQ ID NO: 128 - protein, 1090 aa, Laceyella sacchari
MSIRSFKLKLKTKSGVNAEQLRRGLWRTHQLINDGIAYYMNWLVLLRQEDLFIRNKETNEIEKRSKEEIQAVLLERVHKQQQRNQWSGEVDEQTLLQALRQLYEEIVPSVIGKSGNASLKARFFLGPLVDPNNKTTKDVSKSGPTPKWKKMKDAGDPNWVQEYEKYMAERQTLVRLEEMGLIPLFPMYTDEVGDIHWLPQASGYTRTWDRDMFQQAIERLLSWESWNRRVRERRAQFEKKTHDFASRFSESDVQWMNKLREYEAQQEKSLEENAFAPNEPYALTKKALRGWERVYHSWMRLDSAASEEAYWQEVATCQTAMRGEFGDPAIYQFLAQKENHDIWRGYPERVIDFAELNHLQRELRRAKEDATFTLPDSVDHPLWVRYEAPGGTNIHGYDLVQDTKRNLTLILDKFILPDENGSWHEVKKVPFSLAKSKQFHRQVWLQEEQKQKKREVVFYDYSTNLPHLGTLAGAKLQWDRNFLNKRTQQQIEETGEIGKVFFNISVDVRPAVEVKNGRLQNGLGKALTVLTHPDGTKIVTGWKAEQLEKWVGESGRVSSLGLDSLSEGLRVMSIDLGQRTSATVSVFEITKEAPDNPYKFFYQLEGTEMFAVHQRSFLLALPGENPPQKIKQMREIRWKERNRIKQQVDQLSAILRLHKKVNEDERIQAIDKLLQKVASWQLNEEIATAWNQALSQLYSKAKENDLQWNQAIKNAHHQLEPVVGKQISLWRKDLSTGRQGIAGLSLWSIEELEATKKLLTRWSKRSREPGVVKRIERFETFAKQIQHHINQVKENRLKQLANLIVMTALGYKYDQEQKKWIEVYPACQVVLFENLRSYRFSFERSRRENKKLMEWSHRSIPKLVQMQGELFGLQVADVYAAYSSRYHGRTGAPGIRCHALTEADLRNETNIIHELIEAGFIKEEHRPYLQQGDLVPWSGGELFATLQKPYDNPRILTLHADINAAQNIQKRFWHPSMWFRVNCESVMEGEIVTYVPKNKTVHKKQGKTFRFVKVEGSDVYEWAKWSKNRNKNTFSSITERKPPSSMILFRDPSGTFFKEQEWVEQKTFWGKVQSMIQAYMKKTIVQRMEE

SEQ ID NO: 129 - protein, 1194 aa, Dsulfonatronum thiodismutans
MVLGRKDDTAELRRALWTTHEHVNLAVAEVERVLLRCRGRSYWTLDRRGDPVHVPESQVAEDALAMAREAQRRNGWPVVGEDEEILLALRYLYEQIVPSCLLDDLGKPLKGDAQKIGTNYAGPLFDSDTCRRDEGKDVACCGPFHEVAGKYLGALPEWATPISKQEFDGKDASHLRFKATGGDDAFFRVSIEKANAWYEDPANQDALKNKAYNKDDWKKEKDKGISSWAVKYIQKQLQLGQDPRTEVRRKLWLELGLLPLFIPVFDKTMVGNLWNRLAVRLALAHLLSWESWNHRAVQDQALARAKRDELAALFLGMEDGFAGLREYELRRNESIKQHAFEPVDRPYVVSGRALRSWTRVREEWLRHGDTQESRKNICNRLQDRLRGKFGDPDVFHWLAEDGQEALWKERDCVTSFSLLNDADGLLEKRKGYALMTFADARLHPRWAMYEAPGGSNLRTYQIRKTENGLWADVVLLSPRNESAAVEEKTFNVRLAPSGQLSNVSFDQIQKGSKMVGRCRYQSANQQFEGLLGGAEILFDRKRIANEQHGATDLASKPGHVWFKLTLDVRPQAPQGWLDGKGRPALPPEAKHFKTALSNKSKFADQVRPGLRVLSVDLGVRSFAACSVFELVRGGPDQGTYFPAADGRTVDDPEKLWAKHERSFKITLPGENPSRKEEIARRAAMEELRSLNGDIRRLKAILRLSVLQEDDPRTEHLRLFMEAIVDDPAKSALNAELFKGFGDDRFRSTPDLWKQHCHFFHDKAEKVVAERFSRWRTETRPKSSSWQDWRERRGYAGGKSYWAVTYLEAVRGLILRWNMRGRTYGEVNRQDKKQFGTVASALLHHINQLKEDRIKTGADMIIQAARGFVPRKNGAGWVQVHEPCRLILFEDLARYRFRTDRSRRENSRLMRWSHREIVNEVGMQGELYGLHVDTTEAGFSSRYLASSGAPGVRCRHLVEEDFHDGLPGMHLVGELDWLLPKDKDRTANEARRLLGGMVRPGMLVPWDGGELFATLNAASQLHVIHADINAAQNLQRRFWGRCGEAIRIVCNQLSVDGSTRYEMAKAPKARLLGALQQLKNGDAPFHLTSIPNSQKPENSYVMTPTNAGKKYRAGPGEKSSGEEDELALDIVEQAEELAQGRKTFFRDPSGVFFAPDRWLPSEIYWSRIRRRIWQVTLERNSSGRQERAEMDEMPY

SEQ ID NO: 130 - protein, 1300 aa, Francisella novicida
MSIYQEFVNKYSLSKTLRFELIPQGKTLENIKARGLILDDEKRAKDYKKAKQIIDKYHQFFIEEILSSVCISEDLLQNYSDVYFKLKKSDDDNLQKDFKSAKDTIKKQISEYIKDSEKFKNLFNQNLIDAKKGQESDLILWLKQSKDNGIELFKANSDITDIDEALEIIKSFKGWTTYFKGFHENRKNVYSSNDIPTSIIYRIVDDNLPKFLENKAKYESLKDKAPEAINYEQIKKDLAEELTFDIDYKTSEVNQRVFSLDEVFEIANFNNYLNQSGITKFNTIIGGKFVNGENTKRKGINEYINLYSQQINDKTLKKYKMSVLFKQILSDTESKSFVIDKLEDDSDVVTTMQSFYEQIAAFKTVEEKSIKETLSLLFDDLKAQKLDLSKIYFKNDKSLTDLSQQVFDDYSVIGTAVLEYITQQIAPKNLDNPSKKEQELIAKKTEKAKYLSLETIKLALEEFNKHRDIDKQCRFEEILANFAAIPMIFDEIAQNKDNLAQISIKYQNQGKKDLLQASAEDDVKAIKDLLDQTNNLLHKLKIFHISQSEDKANILDKDEHFYLVFEECYFELANIVPLYNKIRNYITQKPYSDEKFKLNFENSTLANGWDKNKEPDNTAILFIKDDKYYLGVMNKKNNKIFDDKAIKENKGEGYKKIVYKLLPGANKMLPKVFFSAKSIKFYNPSEDILRIRNHSTHTKNGSPQKGYEKFEFNIEDCRKFIDFYKQSISKHPEWKDFGFRFSDTQRYNSIDEFYREVENQGYKLTFENISESYIDSVVNQGKLYLFQIYNKDFSAYSKGRPNLHTLYWKALFDERNLQDVVYKLNGEAELFYRKQSIPKKITHPAKEAIANKNKDNPKKESVFEYDLIKDKRFTEDKFFFHCPITINFKSSGANKFNDEINLLLKEKANDVHILSIDRGERHLAYYTLVDGKGNIIKQDTFNIIGNDRMKTNYHDKLAAIEKDRDSARKDWKKINNIKEMKEGYLSQVVHEIAKLVIEYNAIVVFEDLNFGFKRGRFKVEKQVYQKLEKMLIEKLNYLVFKDNEFDKTGGVLRAYQLTAPFETFKKMGKQTGIIYYVPAGFTSKICPVTGFVNQLYPKYESVSKSQEFFSKFDKICYNLDKGYFEFSFDYKNFGDKAAKGKWTIASFGSRLINFRNSDKNHNWDTREVYPTKELEKLLKDYSIEYGHGECIKAAICGESDKKFFAKLTSVLNTILQMRNSKTGTELDYLISPVADVNGNFFDSRQAPKNMPQDADANGAYHIGLKGLMLLGRIKNNQEGKKLNLVIKNEEYFEFVQNRNN

SEQ ID NO: 131 - protein, 1082 aa, Geobacillus thermodenitrificans; identical to SEQ ID NO: 94

SEQ ID NO: 132 - protein, 887 aa, Natronobacterium gregoryi
MTVIDLDSTTTADELTSGHTYDISVTLTGVYDNTDEQHPRMSLAFEQDNGERRYITLWKNTTPKDVFTYDYATGSTYIFTNIDYEVKDGYENLTATYQTTVENATAQEVGTTDEDETFAGGEPLDHHLDDALNETPDDAETESDSGHVMTSFASRDQLPEWTLHTYTLTATDGAKTDTEYARRTLAYTVRQELYTDHDAAPVATDGLMLLTPEPLGETPLDLDCGVRVEADETRTLDYTTAKDRLLARELVEEGLKRSLWDDYLVRGIDEVLSKEPVLTCDEFDLHERYDLSVEVGHSGRAYLHINFRHRFVPKLTLADIDDDNIYPGLRVKTTYRPRRGHIVWGLRDECATDSLNTLGNQSVVAYHRNNQTPINTDLLDAIEAADRRVVETRRQGHGDDAVSFPQELLAVEPNTHQIKQFASDGFHQQARSKTRLSASRCSEKAQAFAERLDPVRLNGSTVEFSSEFFTGNNEQQLRLLYENGESVLTFRDGARGAHPDETFSKGIVNPPESFEVAVVLPEQQADTCKAQWDTMADLLNQAGAPPTRSETVQYDAFSSPESISLNVAGAIDPSEVDAAFVVLPPDQEGFADLASPTETYDELKKALANMGIYSQMAYFDRFRDAKIFYTRNVALGLLAAAGGVAFTTEHAMPGDADMFIGIDVSRSYPEDGASGQINIAATATAVYKDGTILGHSSTRPQLGEKLQSTDVRDIMKNAILGYQQVTGESPTHIVIHRDGFMNEDLDPATEFLNEQGVEYDIVEIRKQPQTRLLAVSDVQYDTPVKSIAAINQNEPRATVATFGAPEYLATRDGGGLPRPIQIERVAGETDIETLTRQVYLLSQSHIQVHNSTARLPITTAYADQASTHATKGYLVQTGAFESNVGFL

SEQ ID NO: 133 - protein, 1367 aa, Artificial Sequence
  Synthetic
DKKYSIGLDIGTNSVGWAVITDEYKVPSKKFKVLGNTDRHSIKKNLIGALLFDSGETAEATRLKRTARRRYTRRKNRICYLQEIFSNEMAKVDDSFFHRLEESFLVEEDKKHERHPIFGNIVDEVAYHEKYPTIYHLRKKLVDSTDKADLRLIYLALAHMIKFRGHFLIEGDLNPDNSDVDKLFIQLVQTYNQLFEENPINASGVDAKAILSARLSKSRRLENLIAQLPGEKKNGLFGNLIALSLGLTPNFKSNFDLAEDAKLQLSKDTYDDDLDNLLAQIGDQYADLFLAAKNLSDAILLSDILRVNTEITKAPLSASMIKRYDEHHQDLTLLKALVRQQLPEKYKEIFFDQSKNGYAGYIDGGASQEEFYKFIKPILEKMDGTEELLVKLNREDLLRKQRTFDNGSIPHQIHLGELHAILRRQEDFYPFLKDNREKIEKILTFRIPYYVGPLARGNSRFAWMTRKSEETITPWNFEEVVDKGASAQSFIERMTNFDKNLPNEKVLPKHSLLYEYFTVYNELTKVKYVTEGMRKPAFLSGEQKKAIVDLLFKTNRKVTVKQLKEDYFKKIECFDSVEISGVEDRFNASLGTYHDLLKIIKDKDFLDNEENEDILEDIVLTLTLFEDREMIEERLKTYAHLFDDKVMKQLKRRRYTGWGRLSRKLINGIRDKQSGKTILDFLKSDGFANRNFMQLIHDDSLTFKEDIQKAQVSGQGDSLHEHIANLAGSPAIKKGILQTVKVVDELVKVMGRHKPENIVIEMARENQTTQKGQKNSRERMKRIEEGIKELGSQILKEHPVENTQLQNEKLYLYYLQNGRDMYVDQELDINRLSDYDVDAIVPQSFLKDDSIDNKVLTRSDKNRGKSDNVPSEEVVKKMKNYWRQLLNAKLITQRKFDNLTKAERGGLSELDKAGFIKRQLVETRQITKHVAQILDSRMNTKYDENDKLIREVKVITLKSKLVSDFRKDFQFYKVREINNYHHAHDAYLNAVVGTALIKKYPKLESEFVYGDYKVYDVRKMIAKSEQEIGKATAKYFFYSNIMNFFKTEITLANGEIRKRPLIETNGETGEIVWDKGRDFATVRKVLSMPQVNIVKKTEVQTGGFSKESILPKRNSDKLIARKKDWDPKKYGGFVSPTVAYSVLVVAKVEKGKSKKLKSVKELLGITIMERSSFEKNPIDFLEAKGYKEVKKDLIIKLPKYSLFELENGRKRMLASARELQKGNELALPSKYVNFLYLASHYEKLKGSPEDNEQKQLFVEQHKHYLDEIIEQISEFSKRVILADANLDKVLSAYNKHRDKPIREQAENIIHLFTLTNLGAPAAFKYFDTTIDRKQYRSTKEVLDATLIHQSITGLYETRIDLSQLGGD

SEQ ID NO: 134 - protein, 1367 aa, Artificial Sequence
  Synthetic
DKKYSIGLDIGTNSVGWAVITDEYKVPSKKFKVLGNTDRHSIKKNLIGALLFDSGETAEATRLKRTARRRYTRRKNRICYLQEIFSNEMAKVDDSFFHRLEESFLVEEDKKHERHPIFGNIVDEVAYHEKYPTIYHLRKKLVDSTDKADLRLIYLALAHMIKFRGHFLIEGDLNPDNSDVDKLFIQLVQTYNQLFEENPINASGVDAKAILSARLSKSRRLENLIAQLPGEKKNGLFGNLIALSLGLTPNFKSNFDLAEDAKLQLSKDTYDDDLDNLLAQIGDQYADLFLAAKNLSDAILLSDILRVNTEITKAPLSASMIKRYDEHHQDLTLLKALVRQQLPEKYKEIFFDQSKNGYAGYIDGGASQEEFYKFIKPILEKMDGTEELLVKLNREDLLRKQRTFDNGSIPHQIHLGELHAILRRQEDFYPFLKDNREKIEKILTFRIPYYVGPLARGNSRFAWMTRKSEETITPWNFEEVVDKGASAQSFIERMTNFDKNLPNEKVLPKHSLLYEYFTVYNELTKVKYVTEGMRKPAFLSGEQKKAIVDLLFKTNRKVTVKQLKEDYFKKIECFDSVEISGVEDRFNASLGTYHDLLKIIKDKDFLDNEENEDILEDIVLTLTLFEDREMIEERLKTYAHLFDDKVMKQLKRRRYTGWGRLSRKLINGIRDKQSGKTILDFLKSDGFANRNFMQLIHDDSLTFKEDIQKAQVSGQGDSLHEHIANLAGSPAIKKGILQTVKVVDELVKVMGRHKPENIVIEMARENQTTQKGQKNSRERMKRIEEGIKELGSQILKEHPVENTQLQNEKLYLYYLQNGRDMYVDQELDINRLSDYDVDAIVPQSFLKDDSIDNKVLTRSDKNRGKSDNVPSEEVVKKMKNYWRQLLNAKLITQRKFDNLTKAERGGLSELDKAGFIKRQLVETRQITKHVAQILDSRMNTKYDENDKLIREVKVITLKSKLVSDFRKDFQFYKVREINNYHHAHDAYLNAVVGTALIKKYPKLESEFVYGDYKVYDVRKMIAKSEQEIGKATAKYFFYSNIMNFFKTEITLANGEIRKRPLIETNGETGEIVWDKGRDFATVRKVLSMPQVNIVKKTEVQTGGFSKESILPKRNSDKLIARKKDWDPKKYGGFVSPTVAYSVLVVAKVEKGKSKKLKSVKELLGITIMERSSFEKNPIDFLEAKGYKEVKKDLIIKLPKYSLFELENGRKRMLASARELQKGNELALPSKYVNFLYLASHYEKLKGSPEDNEQKQLFVEQHKHYLDEIIEQISEFSKRVILADANLDKVLSAYNKHRDKPIREQAENIIHLFTLTNLGAPAAFKYFDTTIDRKEYRSTKEVLDATLIHQSITGLYETRIDLSQLGGD

SEQ ID NO: 135 - protein, 16 aa, Artificial Sequence
  Synthetic
SGSETPGTSESATPES

SEQ ID NO: 136 - protein, 32 aa, Artificial Sequence
  Synthetic
SGGSSGGSSGSETPGTSESATPESSGGSSGGS

SEQ ID NO: 137 - protein, 4 aa, Artificial Sequence
  Synthetic
  REPEAT (1)..(4)
SGGS

SEQ ID NO: 138 - protein, 4 aa, Artificial Sequence
  Synthetic
  REPEAT (1)..(4)
GGGS

SEQ ID NO: 139 - protein, 5 aa, Artificial Sequence
  Synthetic
  REPEAT (1)..(5)
GGGGS

SEQ ID NO: 140 - protein, 1 aa, Artificial Sequence
  Synthetic
  REPEAT (1)..(1)
G

SEQ ID NO: 141 - protein, 5 aa, Artificial Sequence
  Synthetic
  REPEAT (1)..(5)
EAAAK

SEQ ID NO: 142 - protein, 24 aa, Artificial Sequence
  Synthetic
  REPEAT (1)..(4)
  REPEAT (21)..(24)
SGGSSGSETPGTSESATPESSGGS

SEQ ID NO: 143 - protein, 3 aa, Artificial Sequence
  Synthetic
  REPEAT (1)..(3)
GGS

SEQ ID NO: 144 - protein, 2 aa, Artificial Sequence
  Synthetic
  REPEAT (1)..(2)
  misc_feature (1)..(1): Xaa can be any naturally occurring amino acid
XP

SEQ ID NO: 145 - protein, 24 aa, Artificial Sequence
  Synthetic
SGGSSGSETPGTSESATPESSGGS

SEQ ID NO: 146 - protein, 32 aa, Artificial Sequence; identical to SEQ ID NO: 136
  Synthetic

SEQ ID NO: 147 - protein, 104 aa, Artificial Sequence
  Synthetic
GGSGGSPGSPAGSPTSTEEGTSESATPESGPGTSTEPSEGSAPGSPAGSPTSTEEGTSTEPSEGSAPGTSTEPSEGSAPGTSESATPESGPGSEPATSGGSGGS

SEQ ID NO: 148 - protein, 24 aa, Artificial Sequence
  Synthetic
SGGSSGGSSGSETPGTSESATPES

SEQ ID NO: 149 - protein, 40 aa, Artificial Sequence
  Synthetic
SGGSSGGSSGSETPGTSESATPESSGGSSGGSSGGSSGGS

SEQ ID NO: 150 - protein, 64 aa, Artificial Sequence
  Synthetic
SGGSSGGSSGSETPGTSESATPESSGGSSGGSSGGSSGGSSGSETPGTSESATPESSGGSSGGS

SEQ ID NO: 151 - protein, 92 aa, Artificial Sequence
  Synthetic
PGSPAGSPTSTEEGTSESATPESGPGTSTEPSEGSAPGSPAGSPTSTEEGTSTEPSEGSAPGTSTEPSEGSAPGTSESATPESGPGSEPATS

SEQ ID NO: 152 - protein, 7 aa, Artificial Sequence
  Synthetic
PKKKRKV

SEQ ID NO: 153 - protein, 1561 aa, Artificial Sequence
  Synthetic
MSEVEFSHEYWMRHALTLAKRAWDEREVPVGAVLVHNNRVIGEGWNRPIGRHDPTAHAEIMALRQGGLVMQNYRLIDATLYVTLEPCVMCAGAMIHSRIGRVVFGARDAKTGAAGSLMDVLHHPGMNHRVEITEGILADECAALLSDFFRMRRQEIKAQKKAQSSTDSGSETPGTSESATPESDKKYSIGLAIGTNSVGWAVITDEYKVPSKKFKVLGNTDRHSIKKNLIGALLFDSGETAEATRLKRTARRRYTRRKNRICYLQEIFSNEMAKVDDSFFHRLEESFLVEEDKKHERHPIFGNIVDEVAYHEKYPTIYHLRKKLVDSTDKADLRLIYLALAHMIKFRGHFLIEGDLNPDNSDVDKLFIQLVQTYNQLFEENPINASGVDAKAILSARLSKSRRLENLIAQLPGEKKNGLFGNLIALSLGLTPNFKSNFDLAEDAKLQLSKDTYDDDLDNLLAQIGDQYADLFLAAKNLSDAILLSDILRVNTEITKAPLSASMIKRYDEHHQDLTLLKALVRQQLPEKYKEIFFDQSKNGYAGYIDGGASQEEFYKFIKPILEKMDGTEELLVKLNREDLLRKQRTFDNGSIPHQIHLGELHAILRRQEDFYPFLKDNREKIEKILTFRIPYYVGPLARGNSRFAWMTRKSEETITPWNFEEVVDKGASAQSFIERMTNFDKNLPNEKVLPKHSLLYEYFTVYNELTKVKYVTEGMRKPAFLSGEQKKAIVDLLFKTNRKVTVKQLKEDYFKKIECFDSVEISGVEDRFNASLGTYHDLLKIIKDKDFLDNEENEDILEDIVLTLTLFEDREMIEERLKTYAHLFDDKVMKQLKRRRYTGWGRLSRKLINGIRDKQSGKTILDFLKSDGFANRNFMQLIHDDSLTFKEDIQKAQVSGQGDSLHEHIANLAGSPAIKKGILQTVKVVDELVKVMGRHKPENIVIEMARENQTTQKGQKNSRERMKRIEEGIKELGSQILKEHPVENTQLQNEKLYLYYLQNGRDMYVDQELDINRLSDYDVDHIVPQSFLKDDSIDNKVLTRSDKNRGKSDNVPSEEVVKKMKNYWRQLLNAKLITQRKFDNLTKAERGGLSELDKAGFIKRQLVETRQITKHVAQILDSRMNTKYDENDKLIREVKVITLKSKLVSDFRKDFQFYKVREINNYHHAHDAYLNAVVGTALIKKYPKLESEFVYGDYKVYDVRKMIAKSEQEIGKATAKYFFYSNIMNFFKTEITLANGEIRKRPLIETNGETGEIVWDKGRDFATVRKVLSMPQVNIVKKTEVQTGGFSKESILPKRNSDKLIARKKDWDPKKYGGFDSPTVAYSVLVVAKVEKGKSKKLKSVKELLGITIMERSSFEKNPIDFLEAKGYKEVKKDLIIKLPKYSLFELENGRKRMLASAGELQKGNELALPSKYVNFLYLASHYEKLKGSPEDNEQKQLFVEQHKHYLDEIIEQISEFSKRVILADANLDKVLSAYNKHRDKPIREQAENIIHLFTLTNLGAPAAFKYFDTTIDRKRYTSTKEVLDATLIHQSITGLYETRIDLSQLGGDSGGSPKKKRKV

SEQ ID NO: 154 - protein, 1561 aa, Artificial Sequence
  Synthetic
MSEVEFSHEYWMRHALTLAKRAWDEREVPVGAVLVHNNRVIGEGWNRPIGRHDPTAHAEIMALRQGGLVMQNYRLIDATLYVTLEPCVMCAGAMIHSRIGRVVFGARNAKTGAAGSLMDVLHHPGMNHRVEITEGILADECAALLSDFFRMRRQEIKAQKKAQSSTDSGSETPGTSESATPESDKKYSIGLAIGTNSVGWAVITDEYKVPSKKFKVLGNTDRHSIKKNLIGALLFDSGETAEATRLKRTARRRYTRRKNRICYLQEIFSNEMAKVDDSFFHRLEESFLVEEDKKHERHPIFGNIVDEVAYHEKYPTIYHLRKKLVDSTDKADLRLIYLALAHMIKFRGHFLIEGDLNPDNSDVDKLFIQLVQTYNQLFEENPINASGVDAKAILSARLSKSRRLENLIAQLPGEKKNGLFGNLIALSLGLTPNFKSNFDLAEDAKLQLSKDTYDDDLDNLLAQIGDQYADLFLAAKNLSDAILLSDILRVNTEITKAPLSASMIKRYDEHHQDLTLLKALVRQQLPEKYKEIFFDQSKNGYAGYIDGGASQEEFYKFIKPILEKMDGTEELLVKLNREDLLRKQRTFDNGSIPHQIHLGELHAILRRQEDFYPFLKDNREKIEKILTFRIPYYVGPLARGNSRFAWMTRKSEETITPWNFEEVVDKGASAQSFIERMTNFDKNLPNEKVLPKHSLLYEYFTVYNELTKVKYVTEGMRKPAFLSGEQKKAIVDLLFKTNRKVTVKQLKEDYFKKIECFDSVEISGVEDRFNASLGTYHDLLKIIKDKDFLDNEENEDILEDIVLTLTLFEDREMIEERLKTYAHLFDDKVMKQLKRRRYTGWGRLSRKLINGIRDKQSGKTILDFLKSDGFANRNFMQLIHDDSLTFKEDIQKAQVSGQGDSLHEHIANLAGSPAIKKGILQTVKVVDELVKVMGRHKPENIVIEMARENQTTQKGQKNSRERMKRIEEGIKELGSQILKEHPVENTQLQNEKLYLYYLQNGRDMYVDQELDINRLSDYDVDHIVPQSFLKDDSIDNKVLTRSDKNRGKSDNVPSEEVVKKMKNYWRQLLNAKLITQRKFDNLTKAERGGLSELDKAGFIKRQLVETRQITKHVAQILDSRMNTKYDENDKLIREVKVITLKSKLVSDFRKDFQFYKVREINNYHHAHDAYLNAVVGTALIKKYPKLESEFVYGDYKVYDVRKMIAKSEQEIGKATAKYFFYSNIMNFFKTEITLANGEIRKRPLIETNGETGEIVWDKGRDFATVRKVLSMPQVNIVKKTEVQTGGFSKESILPKRNSDKLIARKKDWDPKKYGGFDSPTVAYSVLVVAKVEKGKSKKLKSVKELLGITIMERSSFEKNPIDFLEAKGYKEVKKDLIIKLPKYSLFELENGRKRMLASAGELQKGNELALPSKYVNFLYLASHYEKLKGSPEDNEQKQLFVEQHKHYLDEIIEQISEFSKRVILADANLDKVLSAYNKHRDKPIREQAENIIHLFTLTNLGAPAAFKYFDTTIDRKRYTSTKEVLDATLIHQSITGLYETRIDLSQLGGDSGGSPKKKRKV

SEQ ID NO: 155 - protein, 1561 aa, Artificial Sequence
  Synthetic
MSEVEFSHEYWMRHALTLAKRAWDEREVPVGAVLVHNNRVIGEGWNRPIGRHDPTAHAEIMALRQGGLVMQNYRLIDATLYVTLEPCVMCAGAMIHSRIGRVVFGARGAKTGAAGSLMDVLHHPGMNHRVEITEGILADECAALLSDFFRMRRQEIKAQKKAQSSTDSGSETPGTSESATPESDKKYSIGLAIGTNSVGWAVITDEYKVPSKKFKVLGNTDRHSIKKNLIGALLFDSGETAEATRLKRTARRRYTRRKNRICYLQEIFSNEMAKVDDSFFHRLEESFLVEEDKKHERHPIFGNIVDEVAYHEKYPTIYHLRKKLVDSTDKADLRLIYLALAHMIKFRGHFLIEGDLNPDNSDVDKLFIQLVQTYNQLFEENPINASGVDAKAILSARLSKSRRLENLIAQLPGEKKNGLFGNLIALSLGLTPNFKSNFDLAEDAKLQLSKDTYDDDLDNLLAQIGDQYADLFLAAKNLSDAILLSDILRVNTEITKAPLSASMIKRYDEHHQDLTLLKALVRQQLPEKYKEIFFDQSKNGYAGYIDGGASQEEFYKFIKPILEKMDGTEELLVKLNREDLLRKQRTFDNGSIPHQIHLGELHAILRRQEDFYPFLKDNREKIEKILTFRIPYYVGPLARGNSRFAWMTRKSEETITPWNFEEVVDKGASAQSFIERMTNFDKNLPNEKVLPKHSLLYEYFTVYNELTKVKYVTEGMRKPAFLSGEQKKAIVDLLFKTNRKVTVKQLKEDYFKKIECFDSVEISGVEDRFNASLGTYHDLLKIIKDKDFLDNEENEDILEDIVLTLTLFEDREMIEERLKTYAHLFDDKVMKQLKRRRYTGWGRLSRKLINGIRDKQSGKTILDFLKSDGFANRNFMQLIHDDSLTFKEDIQKAQVSGQGDSLHEHIANLAGSPAIKKGILQTVKVVDELVKVMGRHKPENIVIEMARENQTTQKGQKNSRERMKRIEEGIKELGSQILKEHPVENTQLQNEKLYLYYLQNGRDMYVDQELDINRLSDYDVDHIVPQSFLKDDSIDNKVLTRSDKNRGKSDNVPSEEVVKKMKNYWRQLLNAKLITQRKFDNLTKAERGGLSELDKAGFIKRQLVETRQITKHVAQILDSRMNTKYDENDKLIREVKVITLKSKLVSDFRKDFQFYKVREINNYHHAHDAYLNAVVGTALIKKYPKLESEFVYGDYKVYDVRKMIAKSEQEIGKATAKYFFYSNIMNFFKTEITLANGEIRKRPLIETNGETGEIVWDKGRDFATVRKVLSMPQVNIVKKTEVQTGGFSKESILPKRNSDKLIARKKDWDPKKYGGFDSPTVAYSVLVVAKVEKGKSKKLKSVKELLGITIMERSSFEKNPIDFLEAKGYKEVKKDLIIKLPKYSLFELENGRKRMLASAGELQKGNELALPSKYVNFLYLASHYEKLKGSPEDNEQKQLFVEQHKHYLDEIIEQISEFSKRVILADANLDKVLSAYNKHRDKPIREQAENIIHLFTLTNLGAPAAFKYFDTTIDRKRYTSTKEVLDATLIHQSITGLYETRIDLSQLGGDSGGSPKKKRKV

SEQ ID NO: 156 - protein, 1561 aa, Artificial Sequence
  Synthetic
MSEVEFSHEYWMRHALTLAKRAWDEREVPVGAVLVHNNRVIGEGWNRPIGRHDPTAHAEIMALRQGGLVMQNYRLIDATLYVTLEPCVMCAGAMIHSRIGRVVFGARVAKTGAAGSLMDVLHHPGMNHRVEITEGILADECAALLSDFFRMRRQEIKAQKKAQSSTDSGSETPGTSESATPESDKKYSIGLAIGTNSVGWAVITDEYKVPSKKFKVLGNTDRHSIKKNLIGALLFDSGETAEATRLKRTARRRYTRRKNRICYLQEIFSNEMAKVDDSFFHRLEESFLVEEDKKHERHPIFGNIVDEVAYHEKYPTIYHLRKKLVDSTDKADLRLIYLALAHMIKFRGHFLIEGDLNPDNSDVDKLFIQLVQTYNQLFEENPINASGVDAKAILSARLSKSRRLENLIAQLPGEKKNGLFGNLIALSLGLTPNFKSNFDLAEDAKLQLSKDTYDDDLDNLLAQIGDQYADLFLAAKNLSDAILLSDILRVNTEITKAPLSASMIKRYDEHHQDLTLLKALVRQQLPEKYKEIFFDQSKNGYAGYIDGGASQEEFYKFIKPILEKMDGTEELLVKLNREDLLRKQRTFDNGSIPHQIHLGELHAILRRQEDFYPFLKDNREKIEKILTFRIPYYVGPLARGNSRFAWMTRKSEETITPWNFEEVVDKGASAQSFIERMTNFDKNLPNEKVLPKHSLLYEYFTVYNELTKVKYVTEGMRKPAFLSGEQKKAIVDLLFKTNRKVTVKQLKEDYFKKIECFDSVEISGVEDRFNASLGTYHDLLKIIKDKDFLDNEENEDILEDIVLTLTLFEDREMIEERLKTYAHLFDDKVMKQLKRRRYTGWGRLSRKLINGIRDKQSGKTILDFLKSDGFANRNFMQLIHDDSLTFKEDIQKAQVSGQGDSLHEHIANLAGSPAIKKGILQTVKVVDELVKVMGRHKPENIVIEMARENQTTQKGQKNSRERMKRIEEGIKELGSQILKEHPVENTQLQNEKLYLYYLQNGRDMYVDQELDINRLSDYDVDHIVPQSFLKDDSIDNKVLTRSDKNRGKSDNVPSEEVVKKMKNYWRQLLNAKLITQRKFDNLTKAERGGLSELDKAGFIKRQLVETRQITKHVAQILDSRMNTKYDENDKLIREVKVITLKSKLVSDFRKDFQFYKVREINNYHHAHDAYLNAVVGTALIKKYPKLESEFVYGDYKVYDVRKMIAKSEQEIGKATAKYFFYSNIMNFFKTEITLANGEIRKRPLIETNGETGEIVWDKGRDFATVRKVLSMPQVNIVKKTEVQTGGFSKESILPKRNSDKLIARKKDWDPKKYGGFDSPTVAYSVLVVAKVEKGKSKKLKSVKELLGITIMERSSFEKNPIDFLEAKGYKEVKKDLIIKLPKYSLFELENGRKRMLASAGELQKGNELALPSKYVNFLYLASHYEKLKGSPEDNEQKQLFVEQHKHYLDEIIEQISEFSKRVILADANLDKVLSAYNKHRDKPIREQAENIIHLFTLTNLGAPAAFKYFDTTIDRKRYTSTKEVLDATLIHQSITGLYETRIDLSQLGGDSGGSPKKKRKV

SEQ ID NO: 157 - protein, 1550 aa, Artificial Sequence
  Synthetic
MSEVEFSYEYWMRHALTLAKRAWDEREVPVGAVLVHNNRVIGEGWNRPIGRHDPTAHAEIMALRQGGLVMQNYRLIDATLYVTLEPCVMCAGAMIHSRIGRVVFGARNAKTGAAGSLMDVLHHPGMSHRVEITEGILADECAALLSDFFRMRRQEIKAQKKAQSSTDSGSETPGTSESATPESDKKYSIGLAIGTNSVGWAVITDEYKVPSKKFKVLGNTDRHSIKKNLIGALLFDSGETAEATRLKRTARRRYTRRKNRICYLQEIFSNEMAKVDDSFFHRLEESFLVEEDKKHERHPIFGNIVDEVAYHEKYPTIYHLRKKLVDSTDKADLRLIYLALAHMIKFRGHFLIEGDLNPDNSDVDKLFIQLVQTYNQLFEENPINASGVDAKAILSARLSKSRRLENLIAQLPGEKKNGLFGNLIALSLGLTPNFKSNFDLAEDAKLQLSKDTYDDDLDNLLAQIGDQYADLFLAAKNLSDAILLSDILRVNTEITKAPLSASMIKRYDEHHQDLTLLKALVRQQLPEKYKEIFFDQSKNGYAGYIDGGASQEEFYKFIKPILEKMDGTEELLVKLNREDLLRKQRTFDNGSIPHQIHLGELHAILRRQEDFYPFLKDNREKIEKILTFRIPYYVGPLARGNSRFAWMTRKSEETITPWNFEEVVDKGASAQSFIERMTNFDKNLPNEKVLPKHSLLYEYFTVYNELTKVKYVTEGMRKPAFLSGEQKKAIVDLLFKTNRKVTVKQLKEDYFKKIECFDSVEISGVEDRFNASLGTYHDLLKIIKDKDFLDNEENEDILEDIVLTLTLFEDREMIEERLKTYAHLFDDKVMKQLKRRRYTGWGRLSRKLINGIRDKQSGKTILDFLKSDGFANRNFMQLIHDDSLTFKEDIQKAQVSGQGDSLHEHIANLAGSPAIKKGILQTVKVVDELVKVMGRHKPENIVIEMARENQTTQKGQKNSRERMKRIEEGIKELGSQILKEHPVENTQLQNEKLYLYYLQNGRDMYVDQELDINRLSDYDVDAIVPQSFLKDDSIDNKVLTRSDKNRGKSDNVPSEEVVKKMKNYWRQLLNAKLITQRKFDNLTKAERGGLSELDKAGFIKRQLVETRQITKHVAQILDSRMNTKYDENDKLIREVKVITLKSKLVSDFRKDFQFYKVREINNYHHAHDAYLNAVVGTALIKKYPKLESEFVYGDYKVYDVRKMIAKSEQEIGKATAKYFFYSNIMNFFKTEITLANGEIRKRPLIETNGETGEIVWDKGRDFATVRKVLSMPQVNIVKKTEVQTGGFSKESILPKRNSDKLIARKKDWDPKKYGGFDSPTVAYSVLVVAKVEKGKSKKLKSVKELLGITIMERSSFEKNPIDFLEAKGYKEVKKDLIIKLPKYSLFELENGRKRMLASAGELQKGNELALPSKYVNFLYLASHYEKLKGSPEDNEQKQLFVEQHKHYLDEIIEQISEFSKRVILADANLDKVLSAYNKHRDKPIREQAENIIHLFTLTNLGAPAAFKYFDTTIDRKRYTSTKEVLDATLIHQSITGLYETRIDLSQLGGD

SEQ ID NO: 158 - protein, 1550 aa, Artificial Sequence
  Synthetic
  misc_feature (155)..(155): Xaa can be any naturally occurring amino acid
MSEVEFSYEYWMRHALTLAKRAWDEREVPVGAVLVHNNRVIGEGWNRPIGRHDPTAHAEIMALRQGGLVMQNYRLIDATLYVTLEPCVMCAGAMIHSRIGRVVFGARNAKTGAAGSLMDVLHHPGMSHRVEITEGILADECAALLSDFFRMRRQXIKAQKKAQSSTDSGSETPGTSESATPESDKKYSIGLAIGTNSVGWAVITDEYKVPSKKFKVLGNTDRHSIKKNLIGALLFDSGETAEATRLKRTARRRYTRRKNRICYLQEIFSNEMAKVDDSFFHRLEESFLVEEDKKHERHPIFGNIVDEVAYHEKYPTIYHLRKKLVDSTDKADLRLIYLALAHMIKFRGHFLIEGDLNPDNSDVDKLFIQLVQTYNQLFEENPINASGVDAKAILSARLSKSRRLENLIAQLPGEKKNGLFGNLIALSLGLTPNFKSNFDLAEDAKLQLSKDTYDDDLDNLLAQIGDQYADLFLAAKNLSDAILLSDILRVNTEITKAPLSASMIKRYDEHHQDLTLLKALVRQQLPEKYKEIFFDQSKNGYAGYIDGGASQEEFYKFIKPILEKMDGTEELLVKLNREDLLRKQRTFDNGSIPHQIHLGELHAILRRQEDFYPFLKDNREKIEKILTFRIPYYVGPLARGNSRFAWMTRKSEETITPWNFEEVVDKGASAQSFIERMTNFDKNLPNEKVLPKHSLLYEYFTVYNELTKVKYVTEGMRKPAFLSGEQKKAIVDLLFKTNRKVTVKQLKEDYFKKIECFDSVEISGVEDRFNASLGTYHDLLKIIKDKDFLDNEENEDILEDIVLTLTLFEDREMIEERLKTYAHLFDDKVMKQLKRRRYTGWGRLSRKLINGIRDKQSGKTILDFLKSDGFANRNFMQLIHDDSLTFKEDIQKAQVSGQGDSLHEHIANLAGSPAIKKGILQTVKVVDELVKVMGRHKPENIVIEMARENQTTQKGQKNSRERMKRIEEGIKELGSQILKEHPVENTQLQNEKLYLYYLQNGRDMYVDQELDINRLSDYDVDAIVPQSFLKDDSIDNKVLTRSDKNRGKSDNVPSEEVVKKMKNYWRQLLNAKLITQRKFDNLTKAERGGLSELDKAGFIKRQLVETRQITKHVAQILDSRMNTKYDENDKLIREVKVITLKSKLVSDFRKDFQFYKVREINNYHHAHDAYLNAVVGTALIKKYPKLESEFVYGDYKVYDVRKMIAKSEQEIGKATAKYFFYSNIMNFFKTEITLANGEIRKRPLIETNGETGEIVWDKGRDFATVRKVLSMPQVNIVKKTEVQTGGFSKESILPKRNSDKLIARKKDWDPKKYGGFDSPTVAYSVLVVAKVEKGKSKKLKSVKELLGITIMERSSFEKNPIDFLEAKGYKEVKKDLIIKLPKYSLFELENGRKRMLASAGELQKGNELALPSKYVNFLYLASHYEKLKGSPEDNEQKQLFVEQHKHYLDEIIEQISEFSKRVILADANLDKVLSAYNKHRDKPIREQAENIIHLFTLTNLGAPAAFKYFDTTIDRKRYTSTKEVLDATLIHQSITGLYETRIDLSQLGGD

SEQ ID NO: 159 - protein, 1775 aa, Artificial Sequence
  Synthetic
MSEVEFSHEYWMRHALTLAKRAWDEREVPVGAVLVHNNRVIGEGWNRPIGRHDPTAHAEIMALRQGGLVMQNYRLIDATLYVTLEPCVMCAGAMIHSRIGRVVFGARDAKTGAAGSLMDVLHHPGMNHRVEITEGILADECAALLSDFFRMRRQEIKAQKKAQSSTDSGGSSGGSSGSETPGTSESATPESSGGSSGGSSEVEFSHEYWMRHALTLAKRALDEREVPVGAVLVLNNRVIGEGWNRAIGLHDPTAHAEIMALRQGGLVMQNYRLIDATLYVTFEPCVMCAGAMIHSRIGRVVFGVRNAKTGAAGSLMDVLHYPGMNHRVEITEGILADECAALLCYFFRMPRQVFNAQKKAQSSTDSGGSSGGSSGSETPGTSESATPESSGGSSGGSDKKYSIGLAIGTNSVGWAVITDEYKVPSKKFKVLGNTDRHSIKKNLIGALLFDSGETAEATRLKRTARRRYTRRKNRICYLQEIFSNEMAKVDDSFFHRLEESFLVEEDKKHERHPIFGNIVDEVAYHEKYPTIYHLRKKLVDSTDKADLRLIYLALAHMIKFRGHFLIEGDLNPDNSDVDKLFIQLVQTYNQLFEENPINASGVDAKAILSARLSKSRRLENLIAQLPGEKKNGLFGNLIALSLGLTPNFKSNFDLAEDAKLQLSKDTYDDDLDNLLAQIGDQYADLFLAAKNLSDAILLSDILRVNTEITKAPLSASMIKRYDEHHQDLTLLKALVRQQLPEKYKEIFFDQSKNGYAGYIDGGASQEEFYKFIKPILEKMDGTEELLVKLNREDLLRKQRTFDNGSIPHQIHLGELHAILRRQEDFYPFLKDNREKIEKILTFRIPYYVGPLARGNSRFAWMTRKSEETITPWNFEEVVDKGASAQSFIERMTNFDKNLPNEKVLPKHSLLYEYFTVYNELTKVKYVTEGMRKPAFLSGEQKKAIVDLLFKTNRKVTVKQLKEDYFKKIECFDSVEISGVEDRFNASLGTYHDLLKIIKDKDFLDNEENEDILEDIVLTLTLFEDREMIEERLKTYAHLFDDKVMKQLKRRRYTGWGRLSRKLINGIRDKQSGKTILDFLKSDGFANRNFMQLIHDDSLTFKEDIQKAQVSGQGDSLHEHIANLAGSPAIKKGILQTVKVVDELVKVMGRHKPENIVIEMARENQTTQKGQKNSRERMKRIEEGIKELGSQILKEHPVENTQLQNEKLYLYYLQNGRDMYVDQELDINRLSDYDVDHIVPQSFLKDDSIDNKVLTRSDKNRGKSDNVPSEEVVKKMKNYWRQLLNAKLITQRKFDNLTKAERGGLSELDKAGFIKRQLVETRQITKHVAQILDSRMNTKYDENDKLIREVKVITLKSKLVSDFRKDFQFYKVREINNYHHAHDAYLNAVVGTALIKKYPKLESEFVYGDYKVYDVRKMIAKSEQEIGKATAKYFFYSNIMNFFKTEITLANGEIRKRPLIETNGETGEIVWDKGRDFATVRKVLSMPQVNIVKKTEVQTGGFSKESILPKRNSDKLIARKKDWDPKKYGGFDSPTVAYSVLVVAKVEKGKSKKLKSVKELLGITIMERSSFEKNPIDFLEAKGYKEVKKDLIIKLPKYSLFELENGRKRMLASAGELQKGNELALPSKYVNFLYLASHYEKLKGSPEDNEQKQLFVEQHKHYLDEIIEQISEFSKRVILADANLDKVLSAYNKHRDKPIREQAENIIHLFTLTNLGAPAAFKYFDTTIDRKRYTSTKEVLDATLIHQSITGLYETRIDLSQLGGDSGGSPKKKRKV

SEQ ID NO: 160 - protein, 1767 aa, Artificial Sequence
  Synthetic
MSEVEFSHEYWMRHALTLAKRAWDEREVPVGAVLVHNNRVIGEGWNRPIGRHDPTAHAEIMALRQGGLVMQNYRLIDATLYVTLEPCVMCAGAMIHSRIGRVVFGARDAKTGAAGSLMDVLHHPGMNHRVEITEGILADECAALLSDFFRMRRQEIKAQKKAQSSTDSGGSSGGSSGSETPGTSESATPESSGGSSGGSSEVEFSHEYWMRHALTLAKRARDEREVPVGAVLVLNNRVIGEGWNRAIGLHDPTAHAEIMALRQGGLVMQNYRLIDATLYVTFEPCVMCAGAMIHSRIGRVVFGVRNAKTGAAGSLMDVLHYPGMNHRVEITEGILADECAALLCYFFRMPRQVFNAQKKAQSSTDSGGSSGGSSGSETPGTSESATPESDKKYSIGLAIGTNSVGWAVITDEYKVPSKKFKVLGNTDRHSIKKNLIGALLFDSGETAEATRLKRTARRRYTRRKNRICYLQEIFSNEMAKVDDSFFHRLEESFLVEEDKKHERHPIFGNIVDEVAYHEKYPTIYHLRKKLVDSTDKADLRLIYLALAHMIKFRGHFLIEGDLNPDNSDVDKLFIQLVQTYNQLFEENPINASGVDAKAILSARLSKSRRLENLIAQLPGEKKNGLFGNLIALSLGLTPNFKSNFDLAEDAKLQLSKDTYDDDLDNLLAQIGDQYADLFLAAKNLSDAILLSDILRVNTEITKAPLSASMIKRYDEHHQDLTLLKALVRQQLPEKYKEIFFDQSKNGYAGYIDGGASQEEFYKFIKPILEKMDGTEELLVKLNREDLLRKQRTFDNGSIPHQIHLGELHAILRRQEDFYPFLKDNREKIEKILTFRIPYYVGPLARGNSRFAWMTRKSEETITPWNFEEVVDKGASAQSFIERMTNFDKNLPNEKVLPKHSLLYEYFTVYNELTKVKYVTEGMRKPAFLSGEQKKAIVDLLFKTNRKVTVKQLKEDYFKKIECFDSVEISGVEDRFNASLGTYHDLLKIIKDKDFLDNEENEDILEDIVLTLTLFEDREMIEERLKTYAHLFDDKVMKQLKRRRYTGWGRLSRKLINGIRDKQSGKTILDFLKSDGFANRNFMQLIHDDSLTFKEDIQKAQVSGQGDSLHEHIANLAGSPAIKKGILQTVKVVDELVKVMGRHKPENIVIEMARENQTTQKGQKNSRERMKRIEEGIKELGSQILKEHPVENTQLQNEKLYLYYLQNGRDMYVDQELDINRLSDYDVDHIVPQSFLKDDSIDNKVLTRSDKNRGKSDNVPSEEVVKKMKNYWRQLLNAKLITQRKFDNLTKAERGGLSELDKAGFIKRQLVETRQITKHVAQILDSRMNTKYDENDKLIREVKVITLKSKLVSDFRKDFQFYKVREINNYHHAHDAYLNAVVGTALIKKYPKLESEFVYGDYKVYDVRKMIAKSEQEIGKATAKYFFYSNIMNFFKTEITLANGEIRKRPLIETNGETGEIVWDKGRDFATVRKVLSMPQVNIVKKTEVQTGGFSKESILPKRNSDKLIARKKDWDPKKYGGFDSPTVAYSVLVVAKVEKGKSKKLKSVKELLGITIMERSSFEKNPIDFLEAKGYKEVKKDLIIKLPKYSLFELENGRKRMLASAGELQKGNELALPSKYVNFLYLASHYEKLKGSPEDNEQKQLFVEQHKHYLDEIIEQISEFSKRVILADANLDKVLSAYNKHRDKPIREQAENIIHLFTLTNLGAPAAFKYFDTTIDRKRYTSTKEVLDATLIHQSITGLYETRIDLSQLGGDSGGSPKKKRKV

SEQ ID NO: 161 - protein, 1775 aa, Artificial Sequence
  Synthetic
MSEVEFSHEYWMRHALTLAKRAWDEREVPVGAVLVHNNRVIGEGWNRPIGRHDPTAHAEIMALRQGGLVMQNYRLIDATLYVTLEPCVMCAGAMIHSRIGRVVFGARDAKTGAAGSLMDVLHHPGMNHRVEITEGILADECAALLSDFFRMRRQEIKAQKKAQSSTDSGGSSGGSSGSETPGTSESATPESSGGSSGGSSEVEFSHEYWMRHALTLAKRAWDEREVPVGAVLVHNNRVIGEGWNRPIGRHDPTAHAEIMALRQGGLVMQNYRLIDATLYVTFEPCVMCAGAMIHSRIGRVVFGVRNAKTGAAGSLMDVLHYPGMNHRVEITEGILADECAALLSYFFRMRRQVFKAQKKAQSSTDSGGSSGGSSGSETPGTSESATPESSGGSSGGSDKKYSIGLAIGTNSVGWAVITDEYKVPSKKFKVLGNTDRHSIKKNLIGALLFDSGETAEATRLKRTARRRYTRRKNRICYLQEIFSNEMAKVDDSFFHRLEESFLVEEDKKHERHPIFGNIVDEVAYHEKYPTIYHLRKKLVDSTDKADLRLIYLALAHMIKFRGHFLIEGDLNPDNSDVDKLFIQLVQTYNQLFEENPINASGVDAKAILSARLSKSRRLENLIAQLPGEKKNGLFGNLIALSLGLTPNFKSNFDLAEDAKLQLSKDTYDDDLDNLLAQIGDQYADLFLAAKNLSDAILLSDILRVNTEITKAPLSASMIKRYDEHHQDLTLLKALVRQQLPEKYKEIFFDQSKNGYAGYIDGGASQEEFYKFIKPILEKMDGTEELLVKLNREDLLRKQRTFDNGSIPHQIHLGELHAILRRQEDFYPFLKDNREKIEKILTFRIPYYVGPLARGNSRFAWMTRKSEETITPWNFEEVVDKGASAQSFIERMTNFDKNLPNEKVLPKHSLLYEYFTVYNELTKVKYVTEGMRKPAFLSGEQKKAIVDLLFKTNRKVTVKQLKEDYFKKIECFDSVEISGVEDRFNASLGTYHDLLKIIKDKDFLDNEENEDILEDIVLTLTLFEDREMIEERLKTYAHLFDDKVMKQLKRRRYTGWGRLSRKLINGIRDKQSGKTILDFLKSDGFANRNFMQLIHDDSLTFKEDIQKAQVSGQGDSLHEHIANLAGSPAIKKGILQTVKVVDELVKVMGRHKPENIVIEMARENQTTQKGQKNSRERMKRIEEGIKELGSQILKEHPVENTQLQNEKLYLYYLQNGRDMYVDQELDINRLSDYDVDHIVPQSFLKDDSIDNKVLTRSDKNRGKSDNVPSEEVVKKMKNYWRQLLNAKLITQRKFDNLTKAERGGLSELDKAGFIKRQLVETRQITKHVAQILDSRMNTKYDENDKLIREVKVITLKSKLVSDFRKDFQFYKVREINNYHHAHDAYLNAVVGTALIKKYPKLESEFVYGDYKVYDVRKMIAKSEQEIGKATAKYFFYSNIMNFFKTEITLANGEIRKRPLIETNGETGEIVWDKGRDFATVRKVLSMPQVNIVKKTEVQTGGFSKESILPKRNSDKLIARKKDWDPKKYGGFDSPTVAYSVLVVAKVEKGKSKKLKSVKELLGITIMERSSFEKNPIDFLEAKGYKEVKKDLIIKLPKYSLFELENGRKRMLASAGELQKGNELALPSKYVNFLYLASHYEKLKGSPEDNEQKQLFVEQHKHYLDEIIEQISEFSKRVILADANLDKVLSAYNKHRDKPIREQAENIIHLFTLTNLGAPAAFKYFDTTIDRKRYTSTKEVLDATLIHQSITGLYETRIDLSQLGGDSGGSPKKKRKV

SEQ ID NO: 162 - protein, 1775 aa, Artificial Sequence
  Synthetic
MSEVEFSHEYWMRHALTLAKRAWDEREVPVGAVLVHNNRVIGEGWNRPIGRHDPTAHAEIMALRQGGLVMQNYRLIDATLYVTLEPCVMCAGAMIHSRIGRVVFGARDAKTGAAGSLMDVLHHPGMNHRVEITEGILADECAALLSDFFRMRRQEIKAQKKAQSSTDSGGSSGGSSGSETPGTSESATPESSGGSSGGSSEVEFSHEYWMRHALTLAKRAWDEREVPVGAVLVLNNRVIGEGWNRPIGLHDPTAHAEIMALRQGGLVMQNYRLIDATLYVTFEPCVMCAGAMIHSRIGRVVFGVRNAKTGAAGSLMDVLHYPGMNHRVEITEGILADECAALLCYFFRMRRQVFNAQKKAQSSTDSGGSSGGSSGSETPGTSESATPESSGGSSGGSDKKYSIGLAIGTNSVGWAVITDEYKVPSKKFKVLGNTDRHSIKKNLIGALLFDSGETAEATRLKRTARRRYTRRKNRICYLQEIFSNEMAKVDDSFFHRLEESFLVEEDKKHERHPIFGNIVDEVAYHEKYPTIYHLRKKLVDSTDKADLRLIYLALAHMIKFRGHFLIEGDLNPDNSDVDKLFIQLVQTYNQLFEENPINASGVDAKAILSARLSKSRRLENLIAQLPGEKKNGLFGNLIALSLGLTPNFKSNFDLAEDAKLQLSKDTYDDDLDNLLAQIGDQYADLFLAAKNLSDAILLSDILRVNTEITKAPLSASMIKRYDEHHQDLTLLKALVRQQLPEKYKEIFFDQSKNGYAGYIDGGASQEEFYKFIKPILEKMDGTEELLVKLNREDLLRKQRTFDNGSIPHQIHLGELHAILRRQEDFYPFLKDNREKIEKILTFRIPYYVGPLARGNSRFAWMTRKSEETITPWNFEEVVDKGASAQSFIERMTNFDKNLPNEKVLPKHSLLYEYFTVYNELTKVKYVTEGMRKPAFLSGEQKKAIVDLLFKTNRKVTVKQLKEDYFKKIECFDSVEISGVEDRFNASLGTYHDLLKIIKDKDFLDNEENEDILEDIVLTLTLFEDREMIEERLKTYAHLFDDKVMKQLKRRRYTGWGRLSRKLINGIRDKQSGKTILDFLKSDGFANRNFMQLIHDDSLTFKEDIQKAQVSGQGDSLHEHIANLAGSPAIKKGILQTVKVVDELVKVMGRHKPENIVIEMARENQTTQKGQKNSRERMKRIEEGIKELGSQILKEHPVENTQLQNEKLYLYYLQNGRDMYVDQELDINRLSDYDVDHIVPQSFLKDDSIDNKVLTRSDKNRGKSDNVPSEEVVKKMKNYWRQLLNAKLITQRKFDNLTKAERGGLSELDKAGFIKRQLVETRQITKHVAQILDSRMNTKYDENDKLIREVKVITLKSKLVSDFRKDFQFYKVREINNYHHAHDAYLNAVVGTALIKKYPKLESEFVYGDYKVYDVRKMIAKSEQEIGKATAKYFFYSNIMNFFKTEITLANGEIRKRPLIETNGETGEIVWDKGRDFATVRKVLSMPQVNIVKKTEVQTGGFSKESILPKRNSDKLIARKKDWDPKKYGGFDSPTVAYSVLVVAKVEKGKSKKLKSVKELLGITIMERSSFEKNPIDFLEAKGYKEVKKDLIIKLPKYSLFELENGRKRMLASAGELQKGNELALPSKYVNFLYLASHYEKLKGSPEDNEQKQLFVEQHKHYLDEIIEQISEFSKRVILADANLDKVLSAYNKHRDKPIREQAENIIHLFTLTNLGAPAAFKYFDTTIDRKRYTSTKEVLDATLIHQSITGLYETRIDLSQLGGDSGGSPKKKRKV

SEQ ID NO: 163 - protein, 1767 aa, Artificial Sequence
  Synthetic
MSEVEFSHEYWMRHALTLAKRAWDEREVPVGAVLVHNNRVIGEGWNRPIGRHDPTAHAEIMALRQGGLVMQNYRLIDATLYVTLEPCVMCAGAMIHSRIGRVVFGARDAKTGAAGSLMDVLHHPGMNHRVEITEGILADECAALLSDFFRMRRQEIKAQKKAQSSTDSGGSSGGSSGSETPGTSESATPESSGGSSGGSSEVEFSHEYWMRHALTLAKRAWDEREVPVGAVLVLNNRVIGEGWNRPIGLHDPTAHAEIMALRQGGLVMQNYRLIDATLYVTFEPCVMCAGAMIHSRIGRVVFGVRNAKTGAAGSLMDVLHYPGMNHRVEITEGILADECAALLCYFFRMRRQVFNAQKKAQSSTDSGGSSGGSSGSETPGTSESATPESDKKYSIGLAIGTNSVGWAVITDEYKVPSKKFKVLGNTDRHSIKKNLIGALLFDSGETAEATRLKRTARRRYTRRKNRICYLQEIFSNEMAKVDDSFFHRLEESFLVEEDKKHERHPIFGNIVDEVAYHEKYPTIYHLRKKLVDSTDKADLRLIYLALAHMIKFRGHFLIEGDLNPDNSDVDKLFIQLVQTYNQLFEENPINASGVDAKAILSARLSKSRRLENLIAQLPGEKKNGLFGNLIALSLGLTPNFKSNFDLAEDAKLQLSKDTYDDDLDNLLAQIGDQYADLFLAAKNLSDAILLSDILRVNTEITKAPLSASMIKRYDEHHQDLTLLKALVRQQLPEKYKEIFFDQSKNGYAGYIDGGASQEEFYKFIKPILEKMDGTEELLVKLNREDLLRKQRTFDNGSIPHQIHLGELHAILRRQEDFYPFLKDNREKIEKILTFRIPYYVGPLARGNSRFAWMTRKSEETITPWNFEEVVDKGASAQSFIERMTNFDKNLPNEKVLPKHSLLYEYFTVYNELTKVKYVTEGMRKPAFLSGEQKKAIVDLLFKTNRKVTVKQLKEDYFKKIECFDSVEISGVEDRFNASLGTYHDLLKIIKDKDFLDNEENEDILEDIVLTLTLFEDREMIEERLKTYAHLFDDKVMKQLKRRRYTGWGRLSRKLINGIRDKQSGKTILDFLKSDGFANRNFMQLIHDDSLTFKEDIQKAQVSGQGDSLHEHIANLAGSPAIKKGILQTVKVVDELVKVMGRHKPENIVIEMARENQTTQKGQKNSRERMKRIEEGIKELGSQILKEHPVENTQLQNEKLYLYYLQNGRDMYVDQELDINRLSDYDVDHIVPQSFLKDDSIDNKVLTRSDKNRGKSDNVPSEEVVKKMKNYWRQLLNAKLITQRKFDNLTKAERGGLSELDKAGFIKRQLVETRQITKHVAQILDSRMNTKYDENDKLIREVKVITLKSKLVSDFRKDFQFYKVREINNYHHAHDAYLNAVVGTALIKKYPKLESEFVYGDYKVYDVRKMIAKSEQEIGKATAKYFFYSNIMNFFKTEITLANGEIRKRPLIETNGETGEIVWDKGRDFATVRKVLSMPQVNIVKKTEVQTGGFSKESILPKRNSDKLIARKKDWDPKKYGGFDSPTVAYSVLVVAKVEKGKSKKLKSVKELLGITIMERSSFEKNPIDFLEAKGYKEVKKDLIIKLPKYSLFELENGRKRMLASAGELQKGNELALPSKYVNFLYLASHYEKLKGSPEDNEQKQLFVEQHKHYLDEIIEQISEFSKRVILADANLDKVLSAYNKHRDKPIREQAENIIHLFTLTNLGAPAAFKYFDTTIDRKRYTSTKEVLDATLIHQSITGLYETRIDLSQLGGDSGGSPKKKRKV

SEQ ID NO: 164 - protein, 1775 aa, Artificial Sequence
  Synthetic
MSEVEFSHEYWMRHALTLAKRAWDEREVPVGAVLVHNNRVIGEGWNRPIGRHDPTAHAEIMALRQGGLVMQNYRLIDATLYVTLEPCVMCAGAMIHSRIGRVVFGARDAKTGAAGSLMDVLHHPGMNHRVEITEGILADECAALLSDFFRMRRQEIKAQKKAQSSTDSGGSSGGSSGSETPGTSESATPESSGGSSGGSSEVEFSHEYWMRHALTLAKRAWDEREVPVGAVLVLNNRVIGEGWNRSIGLHDPTAHAEIMALRQGGLVMQNYRLIDATLYVTFEPCVMCAGAMIHSRIGRVVFGVRNAKTGAAGSLMDVLHYPGMNHRVEITEGILADECAALLCYFFRMRRQVFNAQKKAQSSTDSGGSSGGSSGSETPGTSESATPESSGGSSGGSDKKYSIGLAIGTNSVGWAVITDEYKVPSKKFKVLGNTDRHSIKKNLIGALLFDSGETAEATRLKRTARRRYTRRKNRICYLQEIFSNEMAKVDDSFFHRLEESFLVEEDKKHERHPIFGNIVDEVAYHEKYPTIYHLRKKLVDSTDKADLRLIYLALAHMIKFRGHFLIEGDLNPDNSDVDKLFIQLVQTYNQLFEENPINASGVDAKAILSARLSKSRRLENLIAQLPGEKKNGLFGNLIALSLGLTPNFKSNFDLAEDAKLQLSKDTYDDDLDNLLAQIGDQYADLFLAAKNLSDAILLSDILRVNTEITKAPLSASMIKRYDEHHQDLTLLKALVRQQLPEKYKEIFFDQSKNGYAGYIDGGASQEEFYKFIKPILEKMDGTEELLVKLNREDLLRKQRTFDNGSIPHQIHLGELHAILRRQEDFYPFLKDNREKIEKILTFRIPYYVGPLARGNSRFAWMTRKSEETITPWNFEEVVDKGASAQSFIERMTNFDKNLPNEKVLPKHSLLYEYFTVYNELTKVKYVTEGMRKPAFLSGEQKKAIVDLLFKTNRKVTVKQLKEDYFKKIECFDSVEISGVEDRFNASLGTYHDLLKIIKDKDFLDNEENEDILEDIVLTLTLFEDREMIEERLKTYAHLFDDKVMKQLKRRRYTGWGRLSRKLINGIRDKQSGKTILDFLKSDGFANRNFMQLIHDDSLTFKEDIQKAQVSGQGDSLHEHIANLAGSPAIKKGILQTVKVVDELVKVMGRHKPENIVIEMARENQTTQKGQKNSRERMKRIEEGIKELGSQILKEHPVENTQLQNEKLYLYYLQNGRDMYVDQELDINRLSDYDVDHIVPQSFLKDDSIDNKVLTRSDKNRGKSDNVPSEEVVKKMKNYWRQLLNAKLITQRKFDNLTKAERGGLSELDKAGFIKRQLVETRQITKHVAQILDSRMNTKYDENDKLIREVKVITLKSKLVSDFRKDFQFYKVREINNYHHAHDAYLNAVVGTALIKKYPKLESEFVYGDYKVYDVRKMIAKSEQEIGKATAKYFFYSNIMNFFKTEITLANGEIRKRPLIETNGETGEIVWDKGRDFATVRKVLSMPQVNIVKKTEVQTGGFSKESILPKRNSDKLIARKKDWDPKKYGGFDSPTVAYSVLVVAKVEKGKSKKLKSVKELLGITIMERSSFEKNPIDFLEAKGYKEVKKDLIIKLPKYSLFELENGRKRMLASAGELQKGNELALPSKYVNFLYLASHYEKLKGSPEDNEQKQLFVEQHKHYLDEIIEQISEFSKRVILADANLDKVLSAYNKHRDKPIREQAENIIHLFTLTNLGAPAAFKYFDTTIDRKRYTSTKEVLDATLIHQSITGLYETRIDLSQLGGDSGGSPKKKRKV

SEQ ID NO: 165 - protein, 1775 aa, Artificial Sequence
  Synthetic
MSEVEFSHEYWMRHALTLAKRAWDEREVPVGAVLVHNNRVIGEGWNRPIGRHDPTAHAEIMALRQGGLVMQNYRLIDATLYVTLEPCVMCAGAMIHSRIGRVVFGARDAKTGAAGSLMDVLHHPGMNHRVEITEGILADECAALLSDFFRMRRQEIKAQKKAQSSTDSGGSSGGSSGSETPGTSESATPESSGGSSGGSSEVEFSHEYWMRHALTLAKRAWDEREVPVGAVLVLNNRVIGEGWNRSIGLHDPTAHAEIMALRQGGLVMQNYRLIDATLYVTFEPCVMCAGAMIHSRIGRVVFGVRNAKTGAAGSLMDVLHYPGMNHRVEITEGILADECNALLCYFFRMRRQVFNAQKKAQSSTDSGGSSGGSSGSETPGTSESATPESSGGSSGGSDKKYSIGLAIGTNSVGWAVITDEYKVPSKKFKVLGNTDRHSIKKNLIGALLFDSGETAEATRLKRTARRRYTRRKNRICYLQEIFSNEMAKVDDSFFHRLEESFLVEEDKKHERHPIFGNIVDEVAYHEKYPTIYHLRKKLVDSTDKADLRLIYLALAHMIKFRGHFLIEGDLNPDNSDVDKLFIQLVQTYNQLFEENPINASGVDAKAILSARLSKSRRLENLIAQLPGEKKNGLFGNLIALSLGLTPNFKSNFDLAEDAKLQLSKDTYDDDLDNLLAQIGDQYADLFLAAKNLSDAILLSDILRVNTEITKAPLSASMIKRYDEHHQDLTLLKALVRQQLPEKYKEIFFDQSKNGYAGYIDGGASQEEFYKFIKPILEKMDGTEELLVKLNREDLLRKQRTFDNGSIPHQIHLGELHAILRRQEDFYPFLKDNREKIEKILTFRIPYYVGPLARGNSRFAWMTRKSEETITPWNFEEVVDKGASAQSFIERMTNFDKNLPNEKVLPKHSLLYEYFTVYNELTKVKYVTEGMRKPAFLSGEQKKAIVDLLFKTNRKVTVKQLKEDYFKKIECFDSVEISGVEDRFNASLGTYHDLLKIIKDKDFLDNEENEDILEDIVLTLTLFEDREMIEERLKTYAHLFDDKVMKQLKRRRYTGWGRLSRKLINGIRDKQSGKTILDFLKSDGFANRNFMQLIHDDSLTFKEDIQKAQVSGQGDSLHEHIANLAGSPAIKKGILQTVKVVDELVKVMGRHKPENIVIEMARENQTTQKGQKNSRERMKRIEEGIKELGSQILKEHPVENTQLQNEKLYLYYLQNGRDMYVDQELDINRLSDYDVDHIVPQSFLKDDSIDNKVLTRSDKNRGKSDNVPSEEVVKKMKNYWRQLLNAKLITQRKFDNLTKAERGGLSELDKAGFIKRQLVETRQITKHVAQILDSRMNTKYDENDKLIREVKVITLKSKLVSDFRKDFQFYKVREINNYHHAHDAYLNAVVGTALIKKYPKLESEFVYGDYKVYDVRKMIAKSEQEIGKATAKYFFYSNIMNFFKTEITLANGEIRKRPLIETNGETGEIVWDKGRDFATVRKVLSMPQVNIVKKTEVQTGGFSKESILPKRNSDKLIARKKDWDPKKYGGFDSPTVAYSVLVVAKVEKGKSKKLKSVKELLGITIMERSSFEKNPIDFLEAKGYKEVKKDLIIKLPKYSLFELENGRKRMLASAGELQKGNELALPSKYVNFLYLASHYEKLKGSPEDNEQKQLFVEQHKHYLDEIIEQISEFSKRVILADANLDKVLSAYNKHRDKPIREQAENIIHLFTLTNLGAPAAFKYFDTTIDRKRYTSTKEVLDATLIHQSITGLYETRIDLSQLGGDSGGSPKKKRKV

SEQ ID NO: 166 - protein, 1775 aa, Artificial Sequence
  Synthetic
MSEVEFSHEYWMRHALTLAKRAWDEREVPVGAVLVHNNRVIGEGWNRPIGRHDPTAHAEIMALRQGGLVMQNYRLIDATLYVTLEPCVMCAGAMIHSRIGRVVFGARDAKTGAAGSLMDVLHHPGMNHRVEITEGILADECAALLSDFFRMRRQEIKAQKKAQSSTDSGGSSGGSSGSETPGTSESATPESSGGSSGGSSEVEFSHEYWMRHALTLAKRAWDEREVPVGAVLVLNNRVIGEGWNRAIGLHDPTAHAEIMALRQGGLVMQNYRLIDATLYVTFEPCVMCAGAMIHSRIGRVVFGVRNAKTGAAGSLMDVLHYPGMNHRVEITEGILADECAALLCYFFRMRRQVFNAQKKAQSSTDSGGSSGGSSGSETPGTSESATPESSGGSSGGSDKKYSIGLAIGTNSVGWAVITDEYKVPSKKFKVLGNTDRHSIKKNLIGALLFDSGETAEATRLKRTARRRYTRRKNRICYLQEIFSNEMAKVDDSFFHRLEESFLVEEDKKHERHPIFGNIVDEVAYHEKYPTIYHLRKKLVDSTDKADLRLIYLALAHMIKFRGHFLIEGDLNPDNSDVDKLFIQLVQTYNQLFEENPINASGVDAKAILSARLSKSRRLENLIAQLPGEKKNGLFGNLIALSLGLTPNFKSNFDLAEDAKLQLSKDTYDDDLDNLLAQIGDQYADLFLAAKNLSDAILLSDILRVNTEITKAPLSASMIKRYDEHHQDLTLLKALVRQQLPEKYKEIFFDQSKNGYAGYIDGGASQEEFYKFIKPILEKMDGTEELLVKLNREDLLRKQRTFDNGSIPHQIHLGELHAILRRQEDFYPFLKDNREKIEKILTFRIPYYVGPLARGNSRFAWMTRKSEETITPWNFEEVVDKGASAQSFIERMTNFDKNLPNEKVLPKHSLLYEYFTVYNELTKVKYVTEGMRKPAFLSGEQKKAIVDLLFKTNRKVTVKQLKEDYFKKIECFDSVEISGVEDRFNASLGTYHDLLKIIKDKDFLDNEENEDILEDIVLTLTLFEDREMIEERLKTYAHLFDDKVMKQLKRRRYTGWGRLSRKLINGIRDKQSGKTILDFLKSDGFANRNFMQLIHDDSLTFKEDIQKAQVSGQGDSLHEHIANLAGSPAIKKGILQTVKVVDELVKVMGRHKPENIVIEMARENQTTQKGQKNSRERMKRIEEGIKELGSQILKEHPVENTQLQNEKLYLYYLQNGRDMYVDQELDINRLSDYDVDHIVPQSFLKDDSIDNKVLTRSDKNRGKSDNVPSEEVVKKMKNYWRQLLNAKLITQRKFDNLTKAERGGLSELDKAGFIKRQLVETRQITKHVAQILDSRMNTKYDENDKLIREVKVITLKSKLVSDFRKDFQFYKVREINNYHHAHDAYLNAVVGTALIKKYPKLESEFVYGDYKVYDVRKMIAKSEQEIGKATAKYFFYSNIMNFFKTEITLANGEIRKRPLIETNGETGEIVWDKGRDFATVRKVLSMPQVNIVKKTEVQTGGFSKESILPKRNSDKLIARKKDWDPKKYGGFDSPTVAYSVLVVAKVEKGKSKKLKSVKELLGITIMERSSFEKNPIDFLEAKGYKEVKKDLIIKLPKYSLFELENGRKRMLASAGELQKGNELALPSKYVNFLYLASHYEKLKGSPEDNEQKQLFVEQHKHYLDEIIEQISEFSKRVILADANLDKVLSAYNKHRDKPIREQAENIIHLFTLTNLGAPAAFKYFDTTIDRKRYTSTKEVLDATLIHQSITGLYETRIDLSQLGGDSGGSPKKKRKV

SEQ ID NO: 167 - protein, 1775 aa, Artificial Sequence
  Synthetic
MSEVEFSHEYWMRHALTLAKRAWDEREVPVGAVLVHNNRVIGEGWNRPIGRHDPTAHAEIMALRQGGLVMQNYRLIDATLYVTLEPCVMCAGAMIHSRIGRVVFGARDAKTGAAGSLMDVLHHPGMNHRVEITEGILADECAALLSDFFRMRRQEIKAQKKAQSSTDSGGSSGGSSGSETPGTSESATPESSGGSSGGSSEVEFSHEYWMRHALTLAKRAWDEREVPVGAVLVLNNRVIGEGWNRAIGLHDPTAHAEIMALRQGGLVMQNYRLIDATLYVTFEPCVMCAGAMIHSRIGRVVFGVRNAKTGAAGSLMDVLHYPGMNHRVEITEGILADECNALLCYFFRMRRQVFNAQKKAQSSTDSGGSSGGSSGSETPGTSESATPESSGGSSGGSDKKYSIGLAIGTNSVGWAVITDEYKVPSKKFKVLGNTDRHSIKKNLIGALLFDSGETAEATRLKRTARRRYTRRKNRICYLQEIFSNEMAKVDDSFFHRLEESFLVEEDKKHERHPIFGNIVDEVAYHEKYPTIYHLRKKLVDSTDKADLRLIYLALAHMIKFRGHFLIEGDLNPDNSDVDKLFIQLVQTYNQLFEENPINASGVDAKAILSARLSKSRRLENLIAQLPGEKKNGLFGNLIALSLGLTPNFKSNFDLAEDAKLQLSKDTYDDDLDNLLAQIGDQYADLFLAAKNLSDAILLSDILRVNTEITKAPLSASMIKRYDEHHQDLTLLKALVRQQLPEKYKEIFFDQSKNGYAGYIDGGASQEEFYKFIKPILEKMDGTEELLVKLNREDLLRKQRTFDNGSIPHQIHLGELHAILRRQEDFYPFLKDNREKIEKILTFRIPYYVGPLARGNSRFAWMTRKSEETITPWNFEEVVDKGASAQSFIERMTNFDKNLPNEKVLPKHSLLYEYFTVYNELTKVKYVTEGMRKPAFLSGEQKKAIVDLLFKTNRKVTVKQLKEDYFKKIECFDSVEISGVEDRFNASLGTYHDLLKIIKDKDFLDNEENEDILEDIVLTLTLFEDREMIEERLKTYAHLFDDKVMKQLKRRRYTGWGRLSRKLINGIRDKQSGKTILDFLKSDGFANRNFMQLIHDDSLTFKEDIQKAQVSGQGDSLHEHIANLAGSPAIKKGILQTVKVVDELVKVMGRHKPENIVIEMARENQTTQKGQKNSRERMKRIEEGIKELGSQILKEHPVENTQLQNEKLYLYYLQNGRDMYVDQELDINRLSDYDVDHIVPQSFLKDDSIDNKVLTRSDKNRGKSDNVPSEEVVKKMKNYWRQLLNAKLITQRKFDNLTKAERGGLSELDKAGFIKRQLVETRQITKHVAQILDSRMNTKYDENDKLIREVKVITLKSKLVSDFRKDFQFYKVREINNYHHAHDAYLNAVVGTALIKKYPKLESEFVYGDYKVYDVRKMIAKSEQEIGKATAKYFFYSNIMNFFKTEITLANGEIRKRPLIETNGETGEIVWDKGRDFATVRKVLSMPQVNIVKKTEVQTGGFSKESILPKRNSDKLIARKKDWDPKKYGGFDSPTVAYSVLVVAKVEKGKSKKLKSVKELLGITIMERSSFEKNPIDFLEAKGYKEVKKDLIIKLPKYSLFELENGRKRMLASAGELQKGNELALPSKYVNFLYLASHYEKLKGSPEDNEQKQLFVEQHKHYLDEIIEQISEFSKRVILADANLDKVLSAYNKHRDKPIREQAENIIHLFTLTNLGAPAAFKYFDTTIDRKRYTSTKEVLDATLIHQSITGLYETRIDLSQLGGDSGGSPKKKRKV

SEQ ID NO: 168 - protein, 1775 aa, Artificial Sequence
  Synthetic
MSEVEFSHEYWMRHALTLAKRAWDEREVPVGAVLVHNNRVIGEGWNRPIGRHDPTAHAEIMALRQGGLVMQNYRLIDATLYVTLEPCVMCAGAMIHSRIGRVVFGARDAKTGAAGSLMDVLHHPGMNHRVEITEGILADECAALLSDFFRMRRQEIKAQKKAQSSTDSGGSSGGSSGSETPGTSESATPESSGGSSGGSSEVEFSHEYWMRHALTLAKRARDEREVPVGAVLVLNNRVIGEGWNRAIGLHDPTAHAEIMALRQGGLVMQNYRLIDATLYVTFEPCVMCAGAMIHSRIGRVVFGVRNAKTGAAGSLMDVLHYPGMNHRVEITEGILADECAALLCYFFRMPRQVFNAQKKAQSSTDSGGSSGGSSGSETPGTSESATPESSGGSSGGSDKKYSIGLAIGTNSVGWAVITDEYKVPSKKFKVLGNTDRHSIKKNLIGALLFDSGETAEATRLKRTARRRYTRRKNRICYLQEIFSNEMAKVDDSFFHRLEESFLVEEDKKHERHPIFGNIVDEVAYHEKYPTIYHLRKKLVDSTDKADLRLIYLALAHMIKFRGHFLIEGDLNPDNSDVDKLFIQLVQTYNQLFEENPINASGVDAKAILSARLSKSRRLENLIAQLPGEKKNGLFGNLIALSLGLTPNFKSNFDLAEDAKLQLSKDTYDDDLDNLLAQIGDQYADLFLAAKNLSDAILLSDILRVNTEITKAPLSASMIKRYDEHHQDLTLLKALVRQQLPEKYKEIFFDQSKNGYAGYIDGGASQEEFYKFIKPILEKMDGTEELLVKLNREDLLRKQRTFDNGSIPHQIHLGELHAILRRQEDFYPFLKDNREKIEKILTFRIPYYVGPLARGNSRFAWMTRKSEETITPWNFEEVVDKGASAQSFIERMTNFDKNLPNEKVLPKHSLLYEYFTVYNELTKVKYVTEGMRKPAFLSGEQKKAIVDLLFKTNRKVTVKQLKEDYFKKIECFDSVEISGVEDRFNASLGTYHDLLKIIKDKDFLDNEENEDILEDIVLTLTLFEDREMIEERLKTYAHLFDDKVMKQLKRRRYTGWGRLSRKLINGIRDKQSGKTILDFLKSDGFANRNFMQLIHDDSLTFKEDIQKAQVSGQGDSLHEHIANLAGSPAIKKGILQTVKVVDELVKVMGRHKPENIVIEMARENQTTQKGQKNSRERMKRIEEGIKELGSQILKEHPVENTQLQNEKLYLYYLQNGRDMYVDQELDINRLSDYDVDHIVPQSFLKDDSIDNKVLTRSDKNRGKSDNVPSEEVVKKMKNYWRQLLNAKLITQRKFDNLTKAERGGLSELDKAGFIKRQLVETRQITKHVAQILDSRMNTKYDENDKLIREVKVITLKSKLVSDFRKDFQFYKVREINNYHHAHDAYLNAVVGTALIKKYPKLESEFVYGDYKVYDVRKMIAKSEQEIGKATAKYFFYSNIMNFFKTEITLANGEIRKRPLIETNGETGEIVWDKGRDFATVRKVLSMPQVNIVKKTEVQTGGFSKESILPKRNSDKLIARKKDWDPKKYGGFDSPTVAYSVLVVAKVEKGKSKKLKSVKELLGITIMERSSFEKNPIDFLEAKGYKEVKKDLIIKLPKYSLFELENGRKRMLASAGELQKGNELALPSKYVNFLYLASHYEKLKGSPEDNEQKQLFVEQHKHYLDEIIEQISEFSKRVILADANLDKVLSAYNKHRDKPIREQAENIIHLFTLTNLGAPAAFKYFDTTIDRKRYTSTKEVLDATLIHQSITGLYETRIDLSQLGGDSGGSPKKKRKV

SEQ ID NO: 169 - protein, 1775 aa, Artificial Sequence
  Synthetic
MSEVEFSHEYWMRHALTLAKRAWDEREVPVGAVLVHNNRVIGEGWNRPIGRHDPTAHAEIMALRQGGLVMQNYRLIDATLYVTLEPCVMCAGAMIHSRIGRVVFGARDAKTGAAGSLMDVLHHPGMNHRVEITEGILADECAALLSDFFRMRRQEIKAQKKAQSSTDSGGSSGGSSGSETPGTSESATPESSGGSSGGSSEVEFSHEYWMRHALTLAKRALDEREVPVGAVLVLNNRVIGEGWNRAIGLHDPTAHAEIMALRQGGLVMQNYRLIDATLYVTFEPCVMCAGAMIHSRIGRVVFGVRNAKTGAAGSLMDVLHYPGMNHRVEITEGILADECNALLCYFFRMRRQVFNAQKKAQSSTDSGGSSGGSSGSETPGTSESATPESSGGSSGGSDKKYSIGLAIGTNSVGWAVITDEYKVPSKKFKVLGNTDRHSIKKNLIGALLFDSGETAEATRLKRTARRRYTRRKNRICYLQEIFSNEMAKVDDSFFHRLEESFLVEEDKKHERHPIFGNIVDEVAYHEKYPTIYHLRKKLVDSTDKADLRLIYLALAHMIKFRGHFLIEGDLNPDNSDVDKLFIQLVQTYNQLFEENPINASGVDAKAILSARLSKSRRLENLIAQLPGEKKNGLFGNLIALSLGLTPNFKSNFDLAEDAKLQLSKDTYDDDLDNLLAQIGDQYADLFLAAKNLSDAILLSDILRVNTEITKAPLSASMIKRYDEHHQDLTLLKALVRQQLPEKYKEIFFDQSKNGYAGYIDGGASQEEFYKFIKPILEKMDGTEELLVKLNREDLLRKQRTFDNGSIPHQIHLGELHAILRRQEDFYPFLKDNREKIEKILTFRIPYYVGPLARGNSRFAWMTRKSEETITPWNFEEVVDKGASAQSFIERMTNFDKNLPNEKVLPKHSLLYEYFTVYNELTKVKYVTEGMRKPAFLSGEQKKAIVDLLFKTNRKVTVKQLKEDYFKKIECFDSVEISGVEDRFNASLGTYHDLLKIIKDKDFLDNEENEDILEDIVLTLTLFEDREMIEERLKTYAHLFDDKVMKQLKRRRYTGWGRLSRKLINGIRDKQSGKTILDFLKSDGFANRNFMQLIHDDSLTFKEDIQKAQVSGQGDSLHEHIANLAGSPAIKKGILQTVKVVDELVKVMGRHKPENIVIEMARENQTTQKGQKNSRERMKRIEEGIKELGSQILKEHPVENTQLQNEKLYLYYLQNGRDMYVDQELDINRLSDYDVDHIVPQSFLKDDSIDNKVLTRSDKNRGKSDNVPSEEVVKKMKNYWRQLLNAKLITQRKFDNLTKAERGGLSELDKAGFIKRQLVETRQITKHVAQILDSRMNTKYDENDKLIREVKVITLKSKLVSDFRKDFQFYKVREINNYHHAHDAYLNAVVGTALIKKYPKLESEFVYGDYKVYDVRKMIAKSEQEIGKATAKYFFYSNIMNFFKTEITLANGEIRKRPLIETNGETGEIVWDKGRDFATVRKVLSMPQVNIVKKTEVQTGGFSKESILPKRNSDKLIARKKDWDPKKYGGFDSPTVAYSVLVVAKVEKGKSKKLKSVKELLGITIMERSSFEKNPIDFLEAKGYKEVKKDLIIKLPKYSLFELENGRKRMLASAGELQKGNELALPSKYVNFLYLASHYEKLKGSPEDNEQKQLFVEQHKHYLDEIIEQISEFSKRVILADANLDKVLSAYNKHRDKPIREQAENIIHLFTLTNLGAPAAFKYFDTTIDRKRYTSTKEVLDATLIHQSITGLYETRIDLSQLGGDSGGSPKKKRKV

SEQ ID NO: 170 - protein, 1775 aa, Artificial Sequence
  Synthetic
MSEVEFSHEYWMRHALTLAKRAWDEREVPVGAVLVHNNRVIGEGWNRPIGRHDPTAHAEIMALRQGGLVMQNYRLIDATLYVTLEPCVMCAGAMIHSRIGRVVFGARDAKTGAAGSLMDVLHHPGMNHRVEITEGILADECAALLSDFFRMRRQEIKAQKKAQSSTDSGGSSGGSSGSETPGTSESATPESSGGSSGGSSEVEFSHEYWMRHALTLAKRALDEREVPVGAVLVLNNRVIGEGWNRAIGLHDPTAHAEIMALRQGGLVMQNYRLIDATLYVTFEPCVMCAGAMIHSRIGRVVFGVRNAKTGAAGSLMDVLHYPGMNHRVEITEGILADECNALLCYFFRMPRQVFNAQKKAQSSTDSGGSSGGSSGSETPGTSESATPESSGGSSGGSDKKYSIGLAIGTNSVGWAVITDEYKVPSKKFKVLGNTDRHSIKKNLIGALLFDSGETAEATRLKRTARRRYTRRKNRICYLQEIFSNEMAKVDDSFFHRLEESFLVEEDKKHERHPIFGNIVDEVAYHEKYPTIYHLRKKLVDSTDKADLRLIYLALAHMIKFRGHFLIEGDLNPDNSDVDKLFIQLVQTYNQLFEENPINASGVDAKAILSARLSKSRRLENLIAQLPGEKKNGLFGNLIALSLGLTPNFKSNFDLAEDAKLQLSKDTYDDDLDNLLAQIGDQYADLFLAAKNLSDAILLSDILRVNTEITKAPLSASMIKRYDEHHQDLTLLKALVRQQLPEKYKEIFFDQSKNGYAGYIDGGASQEEFYKFIKPILEKMDGTEELLVKLNREDLLRKQRTFDNGSIPHQIHLGELHAILRRQEDFYPFLKDNREKIEKILTFRIPYYVGPLARGNSRFAWMTRKSEETITPWNFEEVVDKGASAQSFIERMTNFDKNLPNEKVLPKHSLLYEYFTVYNELTKVKYVTEGMRKPAFLSGEQKKAIVDLLFKTNRKVTVKQLKEDYFKKIECFDSVEISGVEDRFNASLGTYHDLLKIIKDKDFLDNEENEDILEDIVLTLTLFEDREMIEERLKTYAHLFDDKVMKQLKRRRYTGWGRLSRKLINGIRDKQSGKTILDFLKSDGFANRNFMQLIHDDSLTFKEDIQKAQVSGQGDSLHEHIANLAGSPAIKKGILQTVKVVDELVKVMGRHKPENIVIEMARENQTTQKGQKNSRERMKRIEEGIKELGSQILKEHPVENTQLQNEKLYLYYLQNGRDMYVDQELDINRLSDYDVDHIVPQSFLKDDSIDNKVLTRSDKNRGKSDNVPSEEVVKKMKNYWRQLLNAKLITQRKFDNLTKAERGGLSELDKAGFIKRQLVETRQITKHVAQILDSRMNTKYDENDKLIREVKVITLKSKLVSDFRKDFQFYKVREINNYHHAHDAYLNAVVGTALIKKYPKLESEFVYGDYKVYDVRKMIAKSEQEIGKATAKYFFYSNIMNFFKTEITLANGEIRKRPLIETNGETGEIVWDKGRDFATVRKVLSMPQVNIVKKTEVQTGGFSKESILPKRNSDKLIARKKDWDPKKYGGFDSPTVAYSVLVVAKVEKGKSKKLKSVKELLGITIMERSSFEKNPIDFLEAKGYKEVKKDLIIKLPKYSLFELENGRKRMLASAGELQKGNELALPSKYVNFLYLASHYEKLKGSPEDNEQKQLFVEQHKHYLDEIIEQISEFSKRVILADANLDKVLSAYNKHRDKPIREQAENIIHLFTLTNLGAPAAFKYFDTTIDRKRYTSTKEVLDATLIHQSITGLYETRIDLSQLGGDSGGSPKKKRKV

SEQ ID NO: 171 - protein, 1775 aa, Artificial Sequence; identical to SEQ ID NO: 168
  Synthetic

SEQ ID NO: 172 - protein, 1767 aa, Artificial Sequence
  Synthetic
MSEVEFSHEYWMRHALTLAKRAWDEREVPVGAVLVHNNRVIGEGWNRPIGRHDPTAHAEIMALRQGGLVMQNYRLIDATLYVTLEPCVMCAGAMIHSRIGRVVFGARDAKTGAAGSLMDVLHHPGMNHRVEITEGILADECAALLSDFFRMRRQEIKAQKKAQSSTDSGGSSGGSSGSETPGTSESATPESSGGSSGGSSEVEFSHEYWMRHALTLAKRAWDEREVPVGAVLVLNNRVIGEGWNRAIGLHDPTAHAEIMALRQGGLVMQNYRLIDATLYVTFEPCVMCAGAMIHSRIGRVVFGVRNAKTGAAGSLMDVLHYPGMNHRVEITEGILADECAALLCYFFRMPRQVFNAQKKAQSSTDSGGSSGGSSGSETPGTSESATPESDKKYSIGLAIGTNSVGWAVITDEYKVPSKKFKVLGNTDRHSIKKNLIGALLFDSGETAEATRLKRTARRRYTRRKNRICYLQEIFSNEMAKVDDSFFHRLEESFLVEEDKKHERHPIFGNIVDEVAYHEKYPTIYHLRKKLVDSTDKADLRLIYLALAHMIKFRGHFLIEGDLNPDNSDVDKLFIQLVQTYNQLFEENPINASGVDAKAILSARLSKSRRLENLIAQLPGEKKNGLFGNLIALSLGLTPNFKSNFDLAEDAKLQLSKDTYDDDLDNLLAQIGDQYADLFLAAKNLSDAILLSDILRVNTEITKAPLSASMIKRYDEHHQDLTLLKALVRQQLPEKYKEIFFDQSKNGYAGYIDGGASQEEFYKFIKPILEKMDGTEELLVKLNREDLLRKQRTFDNGSIPHQIHLGELHAILRRQEDFYPFLKDNREKIEKILTFRIPYYVGPLARGNSRFAWMTRKSEETITPWNFEEVVDKGASAQSFIERMTNFDKNLPNEKVLPKHSLLYEYFTVYNELTKVKYVTEGMRKPAFLSGEQKKAIVDLLFKTNRKVTVKQLKEDYFKKIECFDSVEISGVEDRFNASLGTYHDLLKIIKDKDFLDNEENEDILEDIVLTLTLFEDREMIEERLKTYAHLFDDKVMKQLKRRRYTGWGRLSRKLINGIRDKQSGKTILDFLKSDGFANRNFMQLIHDDSLTFKEDIQKAQVSGQGDSLHEHIANLAGSPAIKKGILQTVKVVDELVKVMGRHKPENIVIEMARENQTTQKGQKNSRERMKRIEEGIKELGSQILKEHPVENTQLQNEKLYLYYLQNGRDMYVDQELDINRLSDYDVDHIVPQSFLKDDSIDNKVLTRSDKNRGKSDNVPSEEVVKKMKNYWRQLLNAKLITQRKFDNLTKAERGGLSELDKAGFIKRQLVETRQITKHVAQILDSRMNTKYDENDKLIREVKVITLKSKLVSDFRKDFQFYKVREINNYHHAHDAYLNAVVGTALIKKYPKLESEFVYGDYKVYDVRKMIAKSEQEIGKATAKYFFYSNIMNFFKTEITLANGEIRKRPLIETNGETGEIVWDKGRDFATVRKVLSMPQVNIVKKTEVQTGGFSKESILPKRNSDKLIARKKDWDPKKYGGFDSPTVAYSVLVVAKVEKGKSKKLKSVKELLGITIMERSSFEKNPIDFLEAKGYKEVKKDLIIKLPKYSLFELENGRKRMLASAGELQKGNELALPSKYVNFLYLASHYEKLKGSPEDNEQKQLFVEQHKHYLDEIIEQISEFSKRVILADANLDKVLSAYNKHRDKPIREQAENIIHLFTLTNLGAPAAFKYFDTTIDRKRYTSTKEVLDATLIHQSITGLYETRIDLSQLGGDSGGSPKKKRKV

SEQ ID NO: 173 - protein, 1767 aa, Artificial Sequence
  Synthetic
MSEVEFSHEYWMRHALTLAKRAWDEREVPVGAVLVHNNRVIGEGWNRPIGRHDPTAHAEIMALRQGGLVMQNYRLIDATLYVTLEPCVMCAGAMIHSRIGRVVFGARDAKTGAAGSLMDVLHHPGMNHRVEITEGILADECAALLSDFFRMRRQEIKAQKKAQSSTDSGGSSGGSSGSETPGTSESATPESSGGSSGGSSEVEFSHEYWMRHALTLAKRAWDEREVPVGAVLVLNNRVIGEGWNRAIGLHDPTAHAEIMALRQGGLVMQNYRLIDATLYVTFEPCVMCAGAMIHSRIGRVVFGVRNAKTGAAGSLMDVLHYPGMNHRVEITEGILADECNALLCYFFRMPRQVFNAQKKAQSSTDSGGSSGGSSGSETPGTSESATPESDKKYSIGLAIGTNSVGWAVITDEYKVPSKKFKVLGNTDRHSIKKNLIGALLFDSGETAEATRLKRTARRRYTRRKNRICYLQEIFSNEMAKVDDSFFHRLEESFLVEEDKKHERHPIFGNIVDEVAYHEKYPTIYHLRKKLVDSTDKADLRLIYLALAHMIKFRGHFLIEGDLNPDNSDVDKLFIQLVQTYNQLFEENPINASGVDAKAILSARLSKSRRLENLIAQLPGEKKNGLFGNLIALSLGLTPNFKSNFDLAEDAKLQLSKDTYDDDLDNLLAQIGDQYADLFLAAKNLSDAILLSDILRVNTEITKAPLSASMIKRYDEHHQDLTLLKALVRQQLPEKYKEIFFDQSKNGYAGYIDGGASQEEFYKFIKPILEKMDGTEELLVKLNREDLLRKQRTFDNGSIPHQIHLGELHAILRRQEDFYPFLKDNREKIEKILTFRIPYYVGPLARGNSRFAWMTRKSEETITPWNFEEVVDKGASAQSFIERMTNFDKNLPNEKVLPKHSLLYEYFTVYNELTKVKYVTEGMRKPAFLSGEQKKAIVDLLFKTNRKVTVKQLKEDYFKKIECFDSVEISGVEDRFNASLGTYHDLLKIIKDKDFLDNEENEDILEDIVLTLTLFEDREMIEERLKTYAHLFDDKVMKQLKRRRYTGWGRLSRKLINGIRDKQSGKTILDFLKSDGFANRNFMQLIHDDSLTFKEDIQKAQVSGQGDSLHEHIANLAGSPAIKKGILQTVKVVDELVKVMGRHKPENIVIEMARENQTTQKGQKNSRERMKRIEEGIKELGSQILKEHPVENTQLQNEKLYLYYLQNGRDMYVDQELDINRLSDYDVDHIVPQSFLKDDSIDNKVLTRSDKNRGKSDNVPSEEVVKKMKNYWRQLLNAKLITQRKFDNLTKAERGGLSELDKAGFIKRQLVETRQITKHVAQILDSRMNTKYDENDKLIREVKVITLKSKLVSDFRKDFQFYKVREINNYHHAHDAYLNAVVGTALIKKYPKLESEFVYGDYKVYDVRKMIAKSEQEIGKATAKYFFYSNIMNFFKTEITLANGEIRKRPLIETNGETGEIVWDKGRDFATVRKVLSMPQVNIVKKTEVQTGGFSKESILPKRNSDKLIARKKDWDPKKYGGFDSPTVAYSVLVVAKVEKGKSKKLKSVKELLGITIMERSSFEKNPIDFLEAKGYKEVKKDLIIKLPKYSLFELENGRKRMLASAGELQKGNELALPSKYVNFLYLASHYEKLKGSPEDNEQKQLFVEQHKHYLDEIIEQISEFSKRVILADANLDKVLSAYNKHRDKPIREQAENIIHLFTLTNLGAPAAFKYFDTTIDRKRYTSTKEVLDATLIHQSITGLYETRIDLSQLGGDSGGSPKKKRKV

SEQ ID NO: 174 - protein, 1767 aa, Artificial Sequence
  Synthetic
MSEVEFSHEYWMRHALTLAKRAWDEREVPVGAVLVHNNRVIGEGWNRPIGRHDPTAHAEIMALRQGGLVMQNYRLIDATLYVTLEPCVMCAGAMIHSRIGRVVFGARDAKTGAAGSLMDVLHHPGMNHRVEITEGILADECAALLSDFFRMRRQEIKAQKKAQSSTDSGGSSGGSSGSETPGTSESATPESSGGSSGGSSEVEFSHEYWMRHALTLAKRALDEREVPVGAVLVLNNRVIGEGWNRAIGLHDPTAHAEIMALRQGGLVMQNYRLIDATLYVTFEPCVMCAGAMIHSRIGRVVFGVRNAKTGAAGSLMDVLHYPGMNHRVEITEGILADECAALLCYFFRMPRQVFNAQKKAQSSTDSGGSSGGSSGSETPGTSESATPESDKKYSIGLAIGTNSVGWAVITDEYKVPSKKFKVLGNTDRHSIKKNLIGALLFDSGETAEATRLKRTARRRYTRRKNRICYLQEIFSNEMAKVDDSFFHRLEESFLVEEDKKHERHPIFGNIVDEVAYHEKYPTIYHLRKKLVDSTDKADLRLIYLALAHMIKFRGHFLIEGDLNPDNSDVDKLFIQLVQTYNQLFEENPINASGVDAKAILSARLSKSRRLENLIAQLPGEKKNGLFGNLIALSLGLTPNFKSNFDLAEDAKLQLSKDTYDDDLDNLLAQIGDQYADLFLAAKNLSDAILLSDILRVNTEITKAPLSASMIKRYDEHHQDLTLLKALVRQQLPEKYKEIFFDQSKNGYAGYIDGGASQEEFYKFIKPILEKMDGTEELLVKLNREDLLRKQRTFDNGSIPHQIHLGELHAILRRQEDFYPFLKDNREKIEKILTFRIPYYVGPLARGNSRFAWMTRKSEETITPWNFEEVVDKGASAQSFIERMTNFDKNLPNEKVLPKHSLLYEYFTVYNELTKVKYVTEGMRKPAFLSGEQKKAIVDLLFKTNRKVTVKQLKEDYFKKIECFDSVEISGVEDRFNASLGTYHDLLKIIKDKDFLDNEENEDILEDIVLTLTLFEDREMIEERLKTYAHLFDDKVMKQLKRRRYTGWGRLSRKLINGIRDKQSGKTILDFLKSDGFANRNFMQLIHDDSLTFKEDIQKAQVSGQGDSLHEHIANLAGSPAIKKGILQTVKVVDELVKVMGRHKPENIVIEMARENQTTQKGQKNSRERMKRIEEGIKELGSQILKEHPVENTQLQNEKLYLYYLQNGRDMYVDQELDINRLSDYDVDHIVPQSFLKDDSIDNKVLTRSDKNRGKSDNVPSEEVVKKMKNYWRQLLNAKLITQRKFDNLTKAERGGLSELDKAGFIKRQLVETRQITKHVAQILDSRMNTKYDENDKLIREVKVITLKSKLVSDFRKDFQFYKVREINNYHHAHDAYLNAVVGTALIKKYPKLESEFVYGDYKVYDVRKMIAKSEQEIGKATAKYFFYSNIMNFFKTEITLANGEIRKRPLIETNGETGEIVWDKGRDFATVRKVLSMPQVNIVKKTEVQTGGFSKESILPKRNSDKLIARKKDWDPKKYGGFDSPTVAYSVLVVAKVEKGKSKKLKSVKELLGITIMERSSFEKNPIDFLEAKGYKEVKKDLIIKLPKYSLFELENGRKRMLASAGELQKGNELALPSKYVNFLYLASHYEKLKGSPEDNEQKQLFVEQHKHYLDEIIEQISEFSKRVILADANLDKVLSAYNKHRDKPIREQAENIIHLFTLTNLGAPAAFKYFDTTIDRKRYTSTKEVLDATLIHQSITGLYETRIDLSQLGGDSGGSPKKKRKV

SEQ ID NO: 175 - protein, 1775 aa, Artificial Sequence; identical to SEQ ID NO: 164
  Synthetic

SEQ ID NO: 176 - protein, 1775 aa, Artificial Sequence; identical to SEQ ID NO: 165
  Synthetic

SEQ ID NO: 177 - protein, 1775 aa, Artificial Sequence; identical to SEQ ID NO: 169
  Synthetic

SEQ ID NO: 178 - protein, 1773 aa, Artificial Sequence
  Synthetic
MSEVEFSHEYWMRHALTLAKRAWDEREVPVGAVLVHNNRVIGEGWNRPIGRHDPTAHAEIMALRQGGLVMQNYRLIDATLYVTLEPCVMCAGAMIHSRIGRVVFGARDAKTGAAGSLMDVLHHPGMNHRVEITEGILADECAALLSDFFRMRRQEIKAQKKAQSSTDSGGSSGGSSGSETPGTSESATPESSGGSSGGSSEVEFSHEYWMRHALTLAKRALDEREVPVGAVLVLNNRGEGWNRAIGLHDPTAHAEIMALRQGGLVMQNYRLIDATLYVTFEPCVMCAGAMIHSRIGRVVFGVRNAKTGAAGSLMDVLHYPGMNHRVEITEGILADECNALLCYFFRMPRQVFNAQKKAQSSTDSGGSSGGSSGSETPGTSESATPESSGGSSGGSDKKYSIGLAIGTNSVGWAVITDEYKVPSKKFKVLGNTDRHSIKKNLIGALLFDSGETAEATRLKRTARRRYTRRKNRICYLQEIFSNEMAKVDDSFFHRLEESFLVEEDKKHERHPIFGNIVDEVAYHEKYPTIYHLRKKLVDSTDKADLRLIYLALAHMIKFRGHFLIEGDLNPDNSDVDKLFIQLVQTYNQLFEENPINASGVDAKAILSARLSKSRRLENLIAQLPGEKKNGLFGNLIALSLGLTPNFKSNFDLAEDAKLQLSKDTYDDDLDNLLAQIGDQYADLFLAAKNLSDAILLSDILRVNTEITKAPLSASMIKRYDEHHQDLTLLKALVRQQLPEKYKEIFFDQSKNGYAGYIDGGASQEEFYKFIKPILEKMDGTEELLVKLNREDLLRKQRTFDNGSIPHQIHLGELHAILRRQEDFYPFLKDNREKIEKILTFRIPYYVGPLARGNSRFAWMTRKSEETITPWNFEEVVDKGASAQSFIERMTNFDKNLPNEKVLPKHSLLYEYFTVYNELTKVKYVTEGMRKPAFLSGEQKKAIVDLLFKTNRKVTVKQLKEDYFKKIECFDSVEISGVEDRFNASLGTYHDLLKIIKDKDFLDNEENEDILEDIVLTLTLFEDREMIEERLKTYAHLFDDKVMKQLKRRRYTGWGRLSRKLINGIRDKQSGKTILDFLKSDGFANRNFMQLIHDDSLTFKEDIQKAQVSGQGDSLHEHIANLAGSPAIKKGILQTVKVVDELVKVMGRHKPENIVIEMARENQTTQKGQKNSRERMKRIEEGIKELGSQILKEHPVENTQLQNEKLYLYYLQNGRDMYVDQELDINRLSDYDVDHIVPQSFLKDDSIDNKVLTRSDKNRGKSDNVPSEEVVKKMKNYWRQLLNAKLITQRKFDNLTKAERGGLSELDKAGFIKRQLVETRQITKHVAQILDSRMNTKYDENDKLIREVKVITLKSKLVSDFRKDFQFYKVREINNYHHAHDAYLNAVVGTALIKKYPKLESEFVYGDYKVYDVRKMIAKSEQEIGKATAKYFFYSNIMNFFKTEITLANGEIRKRPLIETNGETGEIVWDKGRDFATVRKVLSMPQVNIVKKTEVQTGGFSKESILPKRNSDKLIARKKDWDPKKYGGFDSPTVAYSVLVVAKVEKGKSKKLKSVKELLGITIMERSSFEKNPIDFLEAKGYKEVKKDLIIKLPKYSLFELENGRKRMLASAGELQKGNELALPSKYVNFLYLASHYEKLKGSPEDNEQKQLFVEQHKHYLDEIIEQISEFSKRVILADANLDKVLSAYNKHRDKPIREQAENIIHLFTLTNLGAPAAFKYFDTTIDRKRYTSTKEVLDATLIHQSITGLYETRIDLSQLGGDSGGSPKKKRKV

SEQ ID NO: 179 - protein, 1775 aa, Artificial Sequence; identical to SEQ ID NO: 168
  Synthetic

SEQ ID NO: 180 - protein, 1803 aa, Artificial Sequence
  Synthetic
MKRTADGSEFESPKKKRKVSEVEFSHEYWMRHALTLAKRAWDEREVPVGAVLVHNNRVIGEGWNRPIGRHDPTAHAEIMALRQGGLVMQNYRLIDATLYVTLEPCVMCAGAMIHSRIGRVVFGARDAKTGAAGSLMDVLHHPGMNHRVEITEGILADECAALLSDFFRMRRQEIKAQKKAQSSTDSGGSSGGSSGSETPGTSESATPESSGGSSGGSSEVEFSHEYWMRHALTLAKRARDEREVPVGAVLVLNNRVIGEGWNRAIGLHDPTAHAEIMALRQGGLVMQNYRLIDATLYVTFEPCVMCAGAMIHSRIGRVVFGVRNAKTGAAGSLMDVLHYPGMNHRVEITEGILADECAALLCYFFRMPRQVFNAQKKAQSSTDSGGSSGGSSGSETPGTSESATPESSGGSSGGSDKKYSIGLAIGTNSVGWAVITDEYKVPSKKFKVLGNTDRHSIKKNLIGALLFDSGETAEATRLKRTARRRYTRRKNRICYLQEIFSNEMAKVDDSFFHRLEESFLVEEDKKHERHPIFGNIVDEVAYHEKYPTIYHLRKKLVDSTDKADLRLIYLALAHMIKFRGHFLIEGDLNPDNSDVDKLFIQLVQTYNQLFEENPINASGVDAKAILSARLSKSRRLENLIAQLPGEKKNGLFGNLIALSLGLTPNFKSNFDLAEDAKLQLSKDTYDDDLDNLLAQIGDQYADLFLAAKNLSDAILLSDILRVNTEITKAPLSASMIKRYDEHHQDLTLLKALVRQQLPEKYKEIFFDQSKNGYAGYIDGGASQEEFYKFIKPILEKMDGTEELLVKLNREDLLRKQRTFDNGSIPHQIHLGELHAILRRQEDFYPFLKDNREKIEKILTFRIPYYVGPLARGNSRFAWMTRKSEETITPWNFEEVVDKGASAQSFIERMTNFDKNLPNEKVLPKHSLLYEYFTVYNELTKVKYVTEGMRKPAFLSGEQKKAIVDLLFKTNRKVTVKQLKEDYFKKIECFDSVEISGVEDRFNASLGTYHDLLKIIKDKDFLDNEENEDILEDIVLTLTLFEDREMIEERLKTYAHLFDDKVMKQLKRRRYTGWGRLSRKLINGIRDKQSGKTILDFLKSDGFANRNFMQLIHDDSLTFKEDIQKAQVSGQGDSLHEHIANLAGSPAIKKGILQTVKVVDELVKVMGRHKPENIVIEMARENQTTQKGQKNSRERMKRIEEGIKELGSQILKEHPVENTQLQNEKLYLYYLQNGRDMYVDQELDINRLSDYDVDHIVPQSFLKDDSIDNKVLTRSDKNRGKSDNVPSEEVVKKMKNYWRQLLNAKLITQRKFDNLTKAERGGLSELDKAGFIKRQLVETRQITKHVAQILDSRMNTKYDENDKLIREVKVITLKSKLVSDFRKDFQFYKVREINNYHHAHDAYLNAVVGTALIKKYPKLESEFVYGDYKVYDVRKMIAKSEQEIGKATAKYFFYSNIMNFFKTEITLANGEIRKRPLIETNGETGEIVWDKGRDFATVRKVLSMPQVNIVKKTEVQTGGFSKESILPKRNSDKLIARKKDWDPKKYGGFVSPTVAYSVLVVAKVEKGKSKKLKSVKELLGITIMERSSFEKNPIDFLEAKGYKEVKKDLIIKLPKYSLFELENGRKRMLASARELQKGNELALPSKYVNFLYLASHYEKLKGSPEDNEQKQLFVEQHKHYLDEIIEQISEFSKRVILADANLDKVLSAYNKHRDKPIREQAENIIHLFTLTNLGAPAAFKYFDTTIDRKQYRSTKEVLDATLIHQSITGLYETRIDLSQLGGDSGGSKRTADGSEFEPKKKRKV

SEQ ID NO: 181 - protein, 770 aa, Artificial Sequence
  Synthetic
  misc_feature (705)..(705): Xaa may be Phe or His
MAQWNQLQQLDTRYLEQLHQLYSDSFPMELRQFLAPWIESQDWAYAASKESHATLVFHNLLGEIDQQYSRFLQESNVLYQHNLRRIKQFLQSRYLEKPMEIARIVARCLWEESRLLQTAATAAQQGGQANHPTAAVVTEKQQMLEQHLQDVRKRVQDLEQKMKVVENLQDDFDFNYKTLKSQGDMQDLNGNNQSVTRQKMQQLEQMLTALDQMRRSIVSELAGLLSAMEYVQKTLTDEELADWKRRQQIACIGGPPNICLDRLENWITSLAESQLQTRQQIKKLEELQQKVSYKGDPIVQHRPMLEERIVELFRNLMKSAFVVERQPCMPMHPDRPLVIKTGVQFTTKVRLLVKFPELNYQLKIKVCIDKDSGDVAALRGSRKFNILGTNTKVMNMEESNNGSLSAEFKHLTLREQRCGNGGRANCDASLIVTEELHLITFETEVYHQGLKIDLETHSLPVVVISNICQMPNAWASILWYNMLTNNPKNVNFFTKPPIGTWDQVAEVLSWQFSSTTKRGLSIEQLTTLAEKLLGPGVNYSGCQITWAKFCKENMAGKGFSFWVWLDNIIDLVKKYILALWNEGYIMGFISKERERAILSTKPPGTFLLRFSESSKEGGVTFTWVEKDISGKTQIQSVEPYTKQQLNNMSFAEIIMGYKIMDATNILVSPLVYLYPDIPKEEAFGKYCRPESQEHPEADPGSAAPXLKTKFICVTPTTCSNTIDLPMSPRTLDSLMQFGNNGEGAEPSAGGQFESLTFDMELTSECATSPM

SEQ ID NO: 182 - DNA, 39 bp, Artificial Sequence
  Synthetic
ttcttcccaggcgctgccccatacctgaagaccaagttt

SEQ ID NO: 183 - skipped

SEQ ID NO: 184 - DNA, 39 bp, Artificial Sequence; identical to SEQ ID NO: 182
  Synthetic

SEQ ID NO: 185 - DNA, 20 bp, Artificial Sequence
  Synthetic
ttcccaggcgctgccccata

SEQ ID NO: 186 - DNA, 20 bp, Artificial Sequence
  Synthetic
tcccaggcgctgccccatag

SEQ ID NO: 187 - DNA, 20 bp, Artificial Sequence
  Synthetic
cccaggcgctgccccataga

SEQ ID NO: 188 - DNA, 20 bp, Artificial Sequence
  Synthetic
ccaggcgctgccccatagaa

SEQ ID NO: 189 - DNA, 20 bp, Artificial Sequence
  Synthetic
caggcgctgccccatagaac

SEQ ID NO: 190 - DNA, 20 bp, Artificial Sequence
  Synthetic
aggcgctgccccatagaacc

SEQ ID NO: 191 - DNA, 20 bp, Artificial Sequence
  Synthetic
ggcgctgccccatagaacca

SEQ ID NO: 192 - DNA, 20 bp, Artificial Sequence
  Synthetic
gcgctgccccatagaaccaa

SEQ ID NO: 193 - DNA, 20 bp, Artificial Sequence
  Synthetic
cgctgccccatagaaccaag

SEQ ID NO: 194 - DNA, 20 bp, Artificial Sequence
  Synthetic
gctgccccatagaaccaagt

SEQ ID NO: 195 - DNA, 22 bp, Artificial Sequence
  Synthetic
aggcgctgccccatacctgaag

SEQ ID NO: 196 - DNA, 24 bp, Artificial Sequence
  Synthetic
caggcgctgccccatacctgaaga

SEQ ID NO: 197 - DNA, 26 bp, Artificial Sequence
  Synthetic
ccaggcgctgccccatacctgaagaa

SEQ ID NO: 198 - DNA, 28 bp, Artificial Sequence
  Synthetic
cccaggcgctgccccatacctgaagaac

SEQ ID NO: 199 - DNA, 30 bp, Artificial Sequence
  Synthetic
tcccaggcgctgccccatacctgaagaacc

SEQ ID NO: 200 - DNA, 32 bp, Artificial Sequence
  Synthetic
ttcccaggcgctgccccatacctgaagaacca

SEQ ID NO: 201 - DNA, 125 bp, Artificial Sequence
  Synthetic
  misc_feature (1)..(8): n is a, c, g, or t
nnnnnnnngtttttgtactctcaagatttagaaataaatcttgcagaagctacaaagataaggcttcatgccgaaatcaacaccctgtcattttatggcagggtgttttcgttatttaatttttt

SEQ ID NO: 202 - DNA, 121 bp, Artificial Sequence
  Synthetic
  misc_feature (1)..(18): n is a, c, g, or t
nnnnnnnnnnnnnnnnnngtttttgtactctcagaaatgcagaagctacaaagataaggcttcatgccgaaatcaacaccctgtcattttatggcagggtgttttcgttatttaatttttt

SEQ ID NO: 203 - DNA, 109 bp, Artificial Sequence
  Synthetic
  misc_feature (1)..(20): n is a, c, g, or t
nnnnnnnnnnnnnnnnnnnngtttttgtactctcagaaatgcagaagctacaaagataaggcttcatgccgaaatcaacaccctgtcattttatggcagggtgtttttt

SEQ ID NO: 204 - DNA, 102 bp, Artificial Sequence
  Synthetic
  misc_feature (1)..(20): n is a, c, g, or t
nnnnnnnnnnnnnnnnnnnngttttagagctagaaatagcaagttaaaataaggctagtccgttatcaacttgaaaaagtggcaccgagtcggtgctttttt

SEQ ID NO: 205 - DNA, 88 bp, Artificial Sequence
  Synthetic
  misc_feature (1)..(20): n is a, c, g, or t
nnnnnnnnnnnnnnnnnnnngttttagagctagaaatagcaagttaaaataaggctagtccgttatcaacttgaaaaagtgttttttt

SEQ ID NO: 206 - DNA, 76 bp, Artificial Sequence
  Synthetic
  misc_feature (1)..(20): n is a, c, g, or t
nnnnnnnnnnnnnnnnnnnngttttagagctagaaatagcaagttaaaataaggctagtccgttatcatttttttt

SEQ ID NO: 207 - RNA, 82 nt, Artificial Sequence
  Synthetic
guuuuagagcuagaaauagcaaguuaaaauaaaggcuaguccguuaucaacuugaaaaaguggcaccgagucggugcuuuuu

SEQ ID NO: 208 - RNA, 83 nt, Artificial Sequence
  Synthetic
guuuuagagcuagaaauagcaaguuaaaauaaggcuaguccguuaucaacuugaaaaaguggcaccgagucggugcuuuuuuu

SEQ ID NO: 209 - RNA, 103 nt, Artificial Sequence
  Synthetic
gguccacccaccugggcuccguuuuagagcuagaaauagcaaguuaaaauaaggcuaguccguuaucaacuugaaaaaguggcaccgagucggugcuuuuuuu

SEQ ID NO: 210 - RNA, 26 nt, Artificial Sequence
  Synthetic
aaccuguucagguauggggcagcgcc

SEQ ID NO: 211 - RNA, 25 nt, Artificial Sequence
  Synthetic
accuguucagguauggggcagcgcc

SEQ ID NO: 212 - RNA, 24 nt, Artificial Sequence
  Synthetic
ccuguucagguauggggcagcgcc

SEQ ID NO: 213 - RNA, 23 nt, Artificial Sequence
  Synthetic
cuguucagguauggggcagcgcc

SEQ ID NO: 214 - RNA, 22 nt, Artificial Sequence
  Synthetic
uguucagguauggggcagcgcc

SEQ ID NO: 215 - RNA, 21 nt, Artificial Sequence
  Synthetic
guucagguauggggcagcgcc

SEQ ID NO: 216 - RNA, 20 nt, Artificial Sequence
  Synthetic
uucagguauggggcagcgcc

SEQ ID NO: 217 - RNA, 19 nt, Artificial Sequence
  Synthetic
ucagguauggggcagcgcc

SEQ ID NO: 218 - RNA, 18 nt, Artificial Sequence
  Synthetic
cagguauggggcagcgcc

SEQ ID NO: 219 - RNA, 17 nt, Artificial Sequence
  Synthetic
agguauggggcagcgcc

SEQ ID NO: 220 - RNA, 16 nt, Artificial Sequence
  Synthetic
gguauggggcagcgcc

SEQ ID NO: 221 - RNA, 26 nt, Artificial Sequence
  Synthetic
ccuguucagguauggggcagcgccug

SEQ ID NO: 222 - RNA, 25 nt, Artificial Sequence
  Synthetic
cuguucagguauggggcagcgccug

SEQ ID NO: 223 - RNA, 24 nt, Artificial Sequence
  Synthetic
uguucagguauggggcagcgccug

SEQ ID NO: 224 - RNA, 23 nt, Artificial Sequence
  Synthetic
guucagguauggggcagcgccug

SEQ ID NO: 225 - RNA, 22 nt, Artificial Sequence
  Synthetic
uucagguauggggcagcgccug

SEQ ID NO: 226 - RNA, 21 nt, Artificial Sequence
  Synthetic
ucagguauggggcagcgccug

SEQ ID NO: 227 - RNA, 20 nt, Artificial Sequence
  Synthetic
cagguauggggcagcgccug

SEQ ID NO: 228 - RNA, 19 nt, Artificial Sequence
  Synthetic
agguauggggcagcgccug

SEQ ID NO: 229 - RNA, 18 nt, Artificial Sequence
  Synthetic
gguauggggcagcgccug

SEQ ID NO: 230 - RNA, 26 nt, Artificial Sequence
  Synthetic
ccugggugccccauaccugaagacca

SEQ ID NO: 231 - RNA, 26 nt, Artificial Sequence
  Synthetic
cuggguugccccauaccugaagacca

SEQ ID NO: 232 - RNA, 25 nt, Artificial Sequence
  Synthetic
uggguugccccauaccugaagacca

SEQ ID NO: 233 - RNA, 24 nt, Artificial Sequence
  Synthetic
ggguugccccauaccugaagacca

SEQ ID NO: 234 - RNA, 23 nt, Artificial Sequence
  Synthetic
gguugccccauaccugaagacca

SEQ ID NO: 235 - RNA, 22 nt, Artificial Sequence
  Synthetic
guugccccauaccugaagacca

SEQ ID NO: 236 - RNA, 21 nt, Artificial Sequence
  Synthetic
uugccccauaccugaagacca

SEQ ID NO: 237 - RNA, 20 nt, Artificial Sequence
  Synthetic
ugccccauaccugaagacca

SEQ ID NO: 238 - RNA, 19 nt, Artificial Sequence
  Synthetic
gccccauaccugaagacca

SEQ ID NO: 239 - RNA, 18 nt, Artificial Sequence
  Synthetic
ccccauaccugaagacca

SEQ ID NO: 240 - RNA, 17 nt, Artificial Sequence
  Synthetic
cccauaccugaagacca

SEQ ID NO: 241 - RNA, 16 nt, Artificial Sequence
  Synthetic
ccauaccugaagacca

SEQ ID NO: 242 - protein, 166 aa, Artificial Sequence
  Synthetic
SEVEFSHEYWMRHALTLAKRAWDEREVPVGAVLVHNNRVIGEGWNRPIGRHDPTAHAEIMALRQGGLVMQNYRLIDATLYVTLEPCVMCAGAMIHSRIGRVVFGARDAKTGAAGSLMDVLHHPGMNHRVEITEGILADECAALLSDFFRMRRQEIKAQKKAQSSTD

SEQ ID NO: 243 - protein, 18 aa, Artificial Sequence
  Synthetic
KRTADGSEFESPKKKRKV

SEQ ID NO: 244 - protein, 17 aa, Artificial Sequence
  Synthetic
KRTADGSEFEPKKKRKV

SEQ ID NO: 245 - protein, 166 aa, Escherichia coli; identical to SEQ ID NO: 10

SEQ ID NO: 246 - RNA, 97 nt, Artificial Sequence
  Synthetic
ugccccauaccugaagaccaguuuuagagcuagaaauagcaaguuaaaauaaaggcuaguccguuaucaacuugaaaaaguggcaccgagucggugc

SEQ ID NO: 247 - RNA, 77 nt, Artificial Sequence
  Synthetic
guuuuagagcuagaaauagcaaguuaaaauaaaggcuaguccguuaucaacuugaaaaaguggcaccgagucggugc

SEQ ID NO: 248 - RNA, 97 nt, Artificial Sequence
  Synthetic
uucagguauggggcagcgccguuuuagagcuagaaauagcaaguuaaaauaaaggcuaguccguuaucaacuugaaaaaguggcaccgagucggugc

SEQ ID NO: 249 - RNA, 97 nt, Artificial Sequence
  Synthetic
cagguauggggcagcgccugguuuuagagcuagaaauagcaaguuaaaauaaaggcuaguccguuaucaacuugaaaaaguggcaccgagucggugc

SEQ ID NO: 250-281 - skipped (32 entries)

SEQ ID NO: 282 - protein, 1387 aa, Artificial Sequence
  Synthetic
DYKVYDVRKMIAKSEQEIGKATAKYFFYSNIMNFFKTEITLANGEIRKRPLIETNGETGEIVWDKGRDFATVRKVLSMPQVNIVKKTEVQTGGFSKESILPKRNSDKLIARKKDWDPKKYGGFDSPTVAYSVLVVAKVEKGKSKKLKSVKELLGITIMERSSFEKNPIDFLEAKGYKEVKKDLIIKLPKYSLFELENGRKRMLASAGELQKGNELALPSKYVNFLYLASHYEKLKGSPEDNEQKQLFVEQHKHYLDEIIEQISEFSKRVILADANLDKVLSAYNKHRDKPIREQAENIIHLFTLTNLGAPAAFKYFDTTIDRKRYTSTKEVLDATLIHQSITGLYETRIDLSQLGGDGGSGGSGGSGGSGGSGGSGGDKKYSIGLAIGTNSVGWAVITDEYKVPSKKFKVLGNTDRHSIKKNLIGALLFDSGETAEATRLKRTARRRYTRRKNRICYLQEIFSNEMAKVDDSFFHRLEESFLVEEDKKHERHPIFGNIVDEVAYHEKYPTIYHLRKKLVDSTDKADLRLIYLALAHMIKFRGHFLIEGDLNPDNSDVDKLFIQLVQTYNQLFEENPINASGVDAKAILSARLSKSRRLENLIAQLPGEKKNGLFGNLIALSLGLTPNFKSNFDLAEDAKLQLSKDTYDDDLDNLLAQIGDQYADLFLAAKNLSDAILLSDILRVNTEITKAPLSASMIKRYDEHHQDLTLLKALVRQQLPEKYKEIFFDQSKNGYAGYIDGGASQEEFYKFIKPILEKMDGTEELLVKLNREDLLRKQRTFDNGSIPHQIHLGELHAILRRQEDFYPFLKDNREKIEKILTFRIPYYVGPLARGNSRFAWMTRKSEETITPWNFEEVVDKGASAQSFIERMTNFDKNLPNEKVLPKHSLLYEYFTVYNELTKVKYVTEGMRKPAFLSGEQKKAIVDLLFKTNRKVTVKQLKEDYFKKIECFDSVEISGVEDRFNASLGTYHDLLKIIKDKDFLDNEENEDILEDIVLTLTLFEDREMIEERLKTYAHLFDDKVMKQLKRRRYTGWGRLSRKLINGIRDKQSGKTILDFLKSDGFANRNFMQLIHDDSLTFKEDIQKAQVSGQGDSLHEHIANLAGSPAIKKGILQTVKVVDELVKVMGRHKPENIVIEMARENQTTQKGQKNSRERMKRIEEGIKELGSQILKEHPVENTQLQNEKLYLYYLQNGRDMYVDQELDINRLSDYDVDHIVPQSFLKDDSIDNKVLTRSDKNRGKSDNVPSEEVVKKMKNYWRQLLNAKLITQRKFDNLTKAERGGLSELDKAGFIKRQLVETRQITKHVAQILDSRMNTKYDENDKLIREVKVITLKSKLVSDFRKDFQFYKVREINNYHHAHDAYLNAVVGTALIKKYPKLESEFVYG

SEQ ID NO: 283 - protein, 1388 aa, Artificial Sequence
  Synthetic
EIGKATAKYFFYSNIMNFFKTEITLANGEIRKRPLIETNGETGEIVWDKGRDFATVRKVLSMPQVNIVKKTEVQTGGFSKESILPKRNSDKLIARKKDWDPKKYGGFDSPTVAYSVLVVAKVEKGKSKKLKSVKELLGITIMERSSFEKNPIDFLEAKGYKEVKKDLIIKLPKYSLFELENGRKRMLASAGELQKGNELALPSKYVNFLYLASHYEKLKGSPEDNEQKQLFVEQHKHYLDEIIEQISEFSKRVILADANLDKVLSAYNKHRDKPIREQAENIIHLFTLTNLGAPAAFKYFDTTIDRKRYTSTKEVLDATLIHQSITGLYETRIDLSQLGGDGGSGGSGGSGGSGGSGGSGGMDKKYSIGLAIGTNSVGWAVITDEYKVPSKKFKVLGNTDRHSIKKNLIGALLFDSGETAEATRLKRTARRRYTRRKNRICYLQEIFSNEMAKVDDSFFHRLEESFLVEEDKKHERHPIFGNIVDEVAYHEKYPTIYHLRKKLVDSTDKADLRLIYLALAHMIKFRGHFLIEGDLNPDNSDVDKLFIQLVQTYNQLFEENPINASGVDAKAILSARLSKSRRLENLIAQLPGEKKNGLFGNLIALSLGLTPNFKSNFDLAEDAKLQLSKDTYDDDLDNLLAQIGDQYADLFLAAKNLSDAILLSDILRVNTEITKAPLSASMIKRYDEHHQDLTLLKALVRQQLPEKYKEIFFDQSKNGYAGYIDGGASQEEFYKFIKPILEKMDGTEELLVKLNREDLLRKQRTFDNGSIPHQIHLGELHAILRRQEDFYPFLKDNREKIEKILTFRIPYYVGPLARGNSRFAWMTRKSEETITPWNFEEVVDKGASAQSFIERMTNFDKNLPNEKVLPKHSLLYEYFTVYNELTKVKYVTEGMRKPAFLSGEQKKAIVDLLFKTNRKVTVKQLKEDYFKKIECFDSVEISGVEDRFNASLGTYHDLLKIIKDKDFLDNEENEDILEDIVLTLTLFEDREMIEERLKTYAHLFDDKVMKQLKRRRYTGWGRLSRKLINGIRDKQSGKTILDFLKSDGFANRNFMQLIHDDSLTFKEDIQKAQVSGQGDSLHEHIANLAGSPAIKKGILQTVKVVDELVKVMGRHKPENIVIEMARENQTTQKGQKNSRERMKRIEEGIKELGSQILKEHPVENTQLQNEKLYLYYLQNGRDMYVDQELDINRLSDYDVDHIVPQSFLKDDSIDNKVLTRSDKNRGKSDNVPSEEVVKKMKNYWRQLLNAKLITQRKFDNLTKAERGGLSELDKAGFIKRQLVETRQITKHVAQILDSRMNTKYDENDKLIREVKVITLKSKLVSDFRKDFQFYKVREINNYHHAHDAYLNAVVGTALIKKYPKLESEFVYGDYKVYDVRKMIAKSEQ

SEQ ID NO: 284 - protein, 1387 aa, Artificial Sequence
  Synthetic
NIMNFFKTEITLANGEIRKRPLIETNGETGEIVWDKGRDFATVRKVLSMPQVNIVKKTEVQTGGFSKESILPKRNSDKLIARKKDWDPKKYGGFDSPTVAYSVLVVAKVEKGKSKKLKSVKELLGITIMERSSFEKNPIDFLEAKGYKEVKKDLIIKLPKYSLFELENGRKRMLASAGELQKGNELALPSKYVNFLYLASHYEKLKGSPEDNEQKQLFVEQHKHYLDEIIEQISEFSKRVILADANLDKVLSAYNKHRDKPIREQAENIIHLFTLTNLGAPAAFKYFDTTIDRKRYTSTKEVLDATLIHQSITGLYETRIDLSQLGGDGGSGGSGGSGGSGGSGGSGGDKKYSIGLAIGTNSVGWAVITDEYKVPSKKFKVLGNTDRHSIKKNLIGALLFDSGETAEATRLKRTARRRYTRRKNRICYLQEIFSNEMAKVDDSFFHRLEESFLVEEDKKHERHPIFGNIVDEVAYHEKYPTIYHLRKKLVDSTDKADLRLIYLALAHMIKFRGHFLIEGDLNPDNSDVDKLFIQLVQTYNQLFEENPINASGVDAKAILSARLSKSRRLENLIAQLPGEKKNGLFGNLIALSLGLTPNFKSNFDLAEDAKLQLSKDTYDDDLDNLLAQIGDQYADLFLAAKNLSDAILLSDILRVNTEITKAPLSASMIKRYDEHHQDLTLLKALVRQQLPEKYKEIFFDQSKNGYAGYIDGGASQEEFYKFIKPILEKMDGTEELLVKLNREDLLRKQRTFDNGSIPHQIHLGELHAILRRQEDFYPFLKDNREKIEKILTFRIPYYVGPLARGNSRFAWMTRKSEETITPWNFEEVVDKGASAQSFIERMTNFDKNLPNEKVLPKHSLLYEYFTVYNELTKVKYVTEGMRKPAFLSGEQKKAIVDLLFKTNRKVTVKQLKEDYFKKIECFDSVEISGVEDRFNASLGTYHDLLKIIKDKDFLDNEENEDILEDIVLTLTLFEDREMIEERLKTYAHLFDDKVMKQLKRRRYTGWGRLSRKLINGIRDKQSGKTILDFLKSDGFANRNFMQLIHDDSLTFKEDIQKAQVSGQGDSLHEHIANLAGSPAIKKGILQTVKVVDELVKVMGRHKPENIVIEMARENQTTQKGQKNSRERMKRIEEGIKELGSQILKEHPVENTQLQNEKLYLYYLQNGRDMYVDQELDINRLSDYDVDHIVPQSFLKDDSIDNKVLTRSDKNRGKSDNVPSEEVVKKMKNYWRQLLNAKLITQRKFDNLTKAERGGLSELDKAGFIKRQLVETRQITKHVAQILDSRMNTKYDENDKLIREVKVITLKSKLVSDFRKDFQFYKVREINNYHHAHDAYLNAVVGTALIKKYPKLESEFVYGDYKVYDVRKMIAKSEQEIGKATAKYFFYS

SEQ ID NO: 285 - protein, 1388 aa, Artificial Sequence
  Synthetic
PEDNEQKQLFVEQHKHYLDEIIEQISEFSKRVILADANLDKVLSAYNKHRDKPIREQAENIIHLFTLTNLGAPAAFKYFDTTIDRKRYTSTKEVLDATLIHQSITGLYETRIDLSQLGGDGGSGGSGGSGGSGGSGGSGGMDKKYSIGLAIGTNSVGWAVITDEYKVPSKKFKVLGNTDRHSIKKNLIGALLFDSGETAEATRLKRTARRRYTRRKNRICYLQEIFSNEMAKVDDSFFHRLEESFLVEEDKKHERHPIFGNIVDEVAYHEKYPTIYHLRKKLVDSTDKADLRLIYLALAHMIKFRGHFLIEGDLNPDNSDVDKLFIQLVQTYNQLFEENPINASGVDAKAILSARLSKSRRLENLIAQLPGEKKNGLFGNLIALSLGLTPNFKSNFDLAEDAKLQLSKDTYDDDLDNLLAQIGDQYADLFLAAKNLSDAILLSDILRVNTEITKAPLSASMIKRYDEHHQDLTLLKALVRQQLPEKYKEIFFDQSKNGYAGYIDGGASQEEFYKFIKPILEKMDGTEELLVKLNREDLLRKQRTFDNGSIPHQIHLGELHAILRRQEDFYPFLKDNREKIEKILTFRIPYYVGPLARGNSRFAWMTRKSEETITPWNFEEVVDKGASAQSFIERMTNFDKNLPNEKVLPKHSLLYEYFTVYNELTKVKYVTEGMRKPAFLSGEQKKAIVDLLFKTNRKVTVKQLKEDYFKKIECFDSVEISGVEDRFNASLGTYHDLLKIIKDKDFLDNEENEDILEDIVLTLTLFEDREMIEERLKTYAHLFDDKVMKQLKRRRYTGWGRLSRKLINGIRDKQSGKTILDFLKSDGFANRNFMQLIHDDSLTFKEDIQKAQVSGQGDSLHEHIANLAGSPAIKKGILQTVKVVDELVKVMGRHKPENIVIEMARENQTTQKGQKNSRERMKRIEEGIKELGSQILKEHPVENTQLQNEKLYLYYLQNGRDMYVDQELDINRLSDYDVDHIVPQSFLKDDSIDNKVLTRSDKNRGKSDNVPSEEVVKKMKNYWRQLLNAKLITQRKFDNLTKAERGGLSELDKAGFIKRQLVETRQITKHVAQILDSRMNTKYDENDKLIREVKVITLKSKLVSDFRKDFQFYKVREINNYHHAHDAYLNAVVGTALIKKYPKLESEFVYGDYKVYDVRKMIAKSEQEIGKATAKYFFYSNIMNFFKTEITLANGEIRKRPLIETNGETGEIVWDKGRDFATVRKVLSMPQVNIVKKTEVQTGGFSKESILPKRNSDKLIARKKDWDPKKYGGFDSPTVAYSVLVVAKVEKGKSKKLKSVKELLGITIMERSSFEKNPIDFLEAKGYKEVKKDLIIKLPKYSLFELENGRKRMLASAGELQKGNELALPSKYVNFLYLASHYEKLKGS

SEQ ID NO: 286 - protein, 1387 aa, Artificial Sequence
  Synthetic
KPIREQAENIIHLFTLTNLGAPAAFKYFDTTIDRKRYTSTKEVLDATLIHQSITGLYETRIDLSQLGGDGGSGGSGGSGGSGGSGGSGGDKKYSIGLAIGTNSVGWAVITDEYKVPSKKFKVLGNTDRHSIKKNLIGALLFDSGETAEATRLKRTARRRYTRRKNRICYLQEIFSNEMAKVDDSFFHRLEESFLVEEDKKHERHPIFGNIVDEVAYHEKYPTIYHLRKKLVDSTDKADLRLIYLALAHMIKFRGHFLIEGDLNPDNSDVDKLFIQLVQTYNQLFEENPINASGVDAKAILSARLSKSRRLENLIAQLPGEKKNGLFGNLIALSLGLTPNFKSNFDLAEDAKLQLSKDTYDDDLDNLLAQIGDQYADLFLAAKNLSDAILLSDILRVNTEITKAPLSASMIKRYDEHHQDLTLLKALVRQQLPEKYKEIFFDQSKNGYAGYIDGGASQEEFYKFIKPILEKMDGTEELLVKLNREDLLRKQRTFDNGSIPHQIHLGELHAILRRQEDFYPFLKDNREKIEKILTFRIPYYVGPLARGNSRFAWMTRKSEETITPWNFEEVVDKGASAQSFIERMTNFDKNLPNEKVLPKHSLLYEYFTVYNELTKVKYVTEGMRKPAFLSGEQKKAIVDLLFKTNRKVTVKQLKEDYFKKIECFDSVEISGVEDRFNASLGTYHDLLKIIKDKDFLDNEENEDILEDIVLTLTLFEDREMIEERLKTYAHLFDDKVMKQLKRRRYTGWGRLSRKLINGIRDKQSGKTILDFLKSDGFANRNFMQLIHDDSLTFKEDIQKAQVSGQGDSLHEHIANLAGSPAIKKGILQTVKVVDELVKVMGRHKPENIVIEMARENQTTQKGQKNSRERMKRIEEGIKELGSQILKEHPVENTQLQNEKLYLYYLQNGRDMYVDQELDINRLSDYDVDHIVPQSFLKDDSIDNKVLTRSDKNRGKSDNVPSEEVVKKMKNYWRQLLNAKLITQRKFDNLTKAERGGLSELDKAGFIKRQLVETRQITKHVAQILDSRMNTKYDENDKLIREVKVITLKSKLVSDFRKDFQFYKVREINNYHHAHDAYLNAVVGTALIKKYPKLESEFVYGDYKVYDVRKMIAKSEQEIGKATAKYFFYSNIMNFFKTEITLANGEIRKRPLIETNGETGEIVWDKGRDFATVRKVLSMPQVNIVKKTEVQTGGFSKESILPKRNSDKLIARKKDWDPKKYGGFDSPTVAYSVLVVAKVEKGKSKKLKSVKELLGITIMERSSFEKNPIDFLEAKGYKEVKKDLIIKLPKYSLFELENGRKRMLASAGELQKGNELALPSKYVNFLYLASHYEKLKGSPEDNEQKQLFVEQHKHYLDEIIEQISEFSKRVILADANLDKVLSAYNKHRD

SEQ ID NO: 287 - protein, 357 aa, Artificial Sequence
  Synthetic
DYKVYDVRKMIAKSEQEIGKATAKYFFYSNIMNFFKTEITLANGEIRKRPLIETNGETGEIVWDKGRDFATVRKVLSMPQVNIVKKTEVQTGGFSKESILPKRNSDKLIARKKDWDPKKYGGFDSPTVAYSVLVVAKVEKGKSKKLKSVKELLGITIMERSSFEKNPIDFLEAKGYKEVKKDLIIKLPKYSLFELENGRKRMLASAGELQKGNELALPSKYVNFLYLASHYEKLKGSPEDNEQKQLFVEQHKHYLDEIIEQISEFSKRVILADANLDKVLSAYNKHRDKPIREQAENIIHLFTLTNLGAPAAFKYFDTTIDRKRYTSTKEVLDATLIHQSITGLYETRIDLSQLGGD

SEQ ID NO: 288 - protein, 341 aa, Artificial Sequence
  Synthetic
EIGKATAKYFFYSNIMNFFKTEITLANGEIRKRPLIETNGETGEIVWDKGRDFATVRKVLSMPQVNIVKKTEVQTGGFSKESILPKRNSDKLIARKKDWDPKKYGGFDSPTVAYSVLVVAKVEKGKSKKLKSVKELLGITIMERSSFEKNPIDFLEAKGYKEVKKDLIIKLPKYSLFELENGRKRMLASAGELQKGNELALPSKYVNFLYLASHYEKLKGSPEDNEQKQLFVEQHKHYLDEIIEQISEFSKRVILADANLDKVLSAYNKHRDKPIREQAENIIHLFTLTNLGAPAAFKYFDTTIDRKRYTSTKEVLDATLIHQSITGLYETRIDLSQLGGD

SEQ ID NO: 289 - protein, 328 aa, Artificial Sequence
  Synthetic
NIMNFFKTEITLANGEIRKRPLIETNGETGEIVWDKGRDFATVRKVLSMPQVNIVKKTEVQTGGFSKESILPKRNSDKLIARKKDWDPKKYGGFDSPTVAYSVLVVAKVEKGKSKKLKSVKELLGITIMERSSFEKNPIDFLEAKGYKEVKKDLIIKLPKYSLFELENGRKRMLASAGELQKGNELALPSKYVNFLYLASHYEKLKGSPEDNEQKQLFVEQHKHYLDEIIEQISEFSKRVILADANLDKVLSAYNKHRDKPIREQAENIIHLFTLTNLGAPAAFKYFDTTIDRKRYTSTKEVLDATLIHQSITGLYETRIDLSQLGGD

SEQ ID NO: 290 - protein, 120 aa, Artificial Sequence
  Synthetic
PEDNEQKQLFVEQHKHYLDEIIEQISEFSKRVILADANLDKVLSAYNKHRDKPIREQAENIIHLFTLTNLGAPAAFKYFDTTIDRKRYTSTKEVLDATLIHQSITGLYETRIDLSQLGGD

SEQ ID NO: 291 - protein, 69 aa, Artificial Sequence
  Synthetic
KPIREQAENIIHLFTLTNLGAPAAFKYFDTTIDRKRYTSTKEVLDATLIHQSITGLYETRIDLSQLGGD

SEQ ID NO: 292 - protein, 198 aa, Homo Sapiens [sequence omitted]

SEQ ID NO: 293 - protein, 198 aa, Mus musculus
MDSLLMKQKKFLYHFKNVRWAKGRHETYLCYVVKRRDSATSCSLDFGHLRNKSGCHVELLFLRYISDWDLDPGRCYRVTWFTSWSPCYDCARHVAEFLRWNPNLSLRIFTARLYFCEDRKAEPEGLRRLHRAGVQIGIMTFKDYFYCWNTFVENRERTFKAWEGLHENSVRLTRQLRRILLPLYEVDDLRDAFRMLGF

SEQ ID NO: 294 - protein, 198 aa, Canis familiaris
MDSLLMKQRKFLYHFKNVRWAKGRHETYLCYVVKRRDSATSFSLDFGHLRNKSGCHVELLFLRYISDWDLDPGRCYRVTWFTSWSPCYDCARHVADFLRGYPNLSLRIFAARLYFCEDRKAEPEGLRRLHRAGVQIAIMTFKDYFYCWNTFVENREKTFKAWEGLHENSVRLSRQLRRILLPLYEVDDLRDAFRTLGL

SEQ ID NO: 295 - protein, 199 aa, Bos taurus
MDSLLKKQRQFLYQFKNVRWAKGRHETYLCYVVKRRDSPTSFSLDFGHLRNKAGCHVELLFLRYISDWDLDPGRCYRVTWFTSWSPCYDCARHVADFLRGYPNLSLRIFTARLYFCDKERKAEPEGLRRLHRAGVQIAIMTFKDYFYCWNTFVENHERTFKAWEGLHENSVRLSRQLRRILLPLYEVDDLRDAFRTLGL

SEQ ID NO: 296 - protein, 239 aa, Rattus norvegicus
MAVGSKPKAALVGPHWERERIWCFLCSTGLGTQQTGQTSRWLRPAATQDPVSPPRSLLMKQRKFLYHFKNVRWAKGRHETYLCYVVKRRDSATSFSLDFGYLRNKSGCHVELLFLRYISDWDLDPGRCYRVTWFTSWSPCYDCARHVADFLRGNPNLSLRIFTARLTGWGALPAGLMSPARPSDYFYCWNTFVENHERTFKAWEGLHENSVRLSRRLRRILLPLYEVDDLRDAFRTLGL

SEQ ID NO: 297 - protein, 429 aa, Mus musculus
MGPFCLGCSHRKCYSPIRNLISQETFKFHFKNLGYAKGRKDTFLCYEVTRKDCDSPVSLHHGVFKNKDNIHAEICFLYWFHDKVLKVLSPREEFKITWYMSWSPCFECAEQIVRFLATHHNLSLDIFSSRLYNVQDPETQQNLCRLVQEGAQVAAMDLYEFKKCWKKFVDNGGRRFRPWKRLLTNFRYQDSKLQEILRPCYIPVPSSSSSTLSNICLTKGLPETRFCVEGRRMDPLSEEEFYSQFYNQRVKHLCYYHRMKPYLCYQLEQFNGQAPLKGCLLSEKGKQHAEILFLDKIRSMELSQVTITCYLTWSPCPNCAWQLAAFKRDRPDLILHIYTSRLYFHWKRPFQKGLCSLWQSGILVDVMDLPQFTDCWTNFVNPKRPFWPWKGLEIISRRTQRRLRRIKESWGLQDLVNDFGNLQLGPPMS

SEQ ID NO: 298 - protein, 429 aa, Rattus norvegicus
MGPFCLGCSHRKCYSPIRNLISQETFKFHFKNLRYAIDRKDTFLCYEVTRKDCDSPVSLHHGVFKNKDNIHAEICFLYWFHDKVLKVLSPREEFKITWYMSWSPCFECAEQVLRFLATHHNLSLDIFSSRLYNIRDPENQQNLCRLVQEGAQVAAMDLYEFKKCWKKFVDNGGRRFRPWKKLLTNFRYQDSKLQEILRPCYIPVPSSSSSTLSNICLTKGLPETRFCVERRRVHLLSEEEFYSQFYNQRVKHLCYYHGVKPYLCYQLEQFNGQAPLKGCLLSEKGKQHAEILFLDKIRSMELSQVIITCYLTWSPCPNCAWQLAAFKRDRPDLILHIYTSRLYFHWKRPFQKGLCSLWQSGILVDVMDLPQFTDCWTNFVNPKRPFWPWKGLEIISRRTQRRLHRIKESWGLQDLVNDFGNLQLGPPMS

SEQ ID NO: 299 - protein, 370 aa, Macaca mulatta
MVEPMDPRTFVSNFNNRPILSGLNTVWLCCEVKTKDPSGPPLDAKIFQGKVYSKAKYHPEMRFLRWFHKWRQLHHDQEYKVTWYVSWSPCTRCANSVATFLAKDPKVTLTIFVARLYYFWKPDYQQALRILCQKRGGPHATMKIMNYNEFQDCWNKFVDGRGKPFKPRNNLPKHYTLLQATLGELLRHLMDPGTFTSNFNNKPWVSGQHETYLCYKVERLHNDTWVPLNQHRGFLRNQAPNIHGFPKGRHAELCFLDLIPFWKLDGQQYRVTCFTSWSPCFSCAQEMAKFISNNEHVSLCIFAARIYDDQGRYQEGLRALHRDGAKIAMMNYSEFEYCWDTFVDRQGRPFQPWDGLDEHSQALSGRLRAI

SEQ ID NO: 300 - protein, 384 aa, Pan troglodytes
MKPHFRNPVERMYQDTFSDNFYNRPILSHRNTVWLCYEVKTKGPSRPPLDAKIFRGQVYSKLKYHPEMRFFHWFSKWRKLHRDQEYEVTWYISWSPCTKCTRDVATFLAEDPKVTLTIFVARLYYFWDPDYQEALRSLCQKRDGPRATMKIMNYDEFQHCWSKFVYSQRELFEPWNNLPKYYILLHIMLGEILRHSMDPPTFTSNFNNELWVRGRHETYLCYEVERLHNDTWVLLNQRRGFLCNQAPHKHGFLEGRHAELCFLDVIPFWKLDLHQDYRVTCFTSWSPCFSCAQEMAKFISNNKHVSLCIFAARIYDDQGRCQEGLRTLAKAGAKISIMTYSEFKHCWDTFVDHQGCPFQPWDGLEEHSQALSGRLRAILQNQGN

SEQ ID NO: 301 - protein, 377 aa, Chlorocebus sabaeus
MNPQIRNMVEQMEPDIFVYYFNNRPILSGRNTVWLCYEVKTKDPSGPPLDANIFQGKLYPEAKDHPEMKFLHWFRKWRQLHRDQEYEVTWYVSWSPCTRCANSVATFLAEDPKVTLTIFVARLYYFWKPDYQQALRILCQERGGPHATMKIMNYNEFQHCWNEFVDGQGKPFKPRKNLPKHYTLLHATLGELLRHVMDPGTFTSNFNNKPWVSGQRETYLCYKVERSHNDTWVLLNQHRGFLRNQAPDRHGFPKGRHAELCFLDLIPFWKLDDQQYRVTCFTSWSPCFSCAQKMAKFISNNKHVSLCIFAARIYDDQGRCQEGLRTLHRDGAKIAVMNYSEFEYCWDTFVDRQGRPFQPWDGLDEHSQALSGRLRAI

SEQ ID NO: 302 - protein, 384 aa, Homo Sapiens
MKPHFRNTVERMYRDTFSYNFYNRPILSRRNTVWLCYEVKTKGPSRPPLDAKIFRGQVYSELKYHPEMRFFHWFSKWRKLHRDQEYEVTWYISWSPCTKCTRDMATFLAEDPKVTLTIFVARLYYFWDPDYQEALRSLCQKRDGPRATMKIMNYDEFQHCWSKFVYSQRELFEPWNNLPKYYILLHIMLGEILRHSMDPPTFTFNFNNEPWVRGRHETYLCYEVERMHNDTWVLLNQRRGFLCNQAPHKHGFLEGRHAELCFLDVIPFWKLDLDQDYRVTCFTSWSPCFSCAQEMAKFISKNKHVSLCIFTARIYDDQGRCQEGLRTLAEAGAKISIMTYSEFKHCWDTFVDHQGCPFQPWDGLDEHSQDLSGRLRAILQNQEN

SEQ ID NO: 303 - protein, 373 aa, Homo Sapiens
MKPHFRNTVERMYRDTFSYNFYNRPILSRRNTVWLCYEVKTKGPSRPRLDAKIFRGQVYSQPEHHAEMCFLSWFCGNQLPAYKCFQITWFVSWTPCPDCVAKLAEFLAEHPNVTLTISAARLYYYWERDYRRALCRLSQAGARVKIMDDEEFAYCWENFVYSEGQPFMPWYKFDDNYAFLHRTLKEILRNPMEAMYPHIFYFHFKNLRKAYGRNESWLCFTMEVVKHHSPVSWKRGVFRNQVDPETHCHAERCFLSWFCDDILSPNTNYEVTWYTSWSPCPECAGEVAEFLARHSNVNLTIFTARLYYFWDTDYQEGLRSLSQEGASVEIMGYKDFKYCWENFVYNDDEPFKPWKGLKYNFLFLDSKLQEILE

SEQ ID NO: 304 - protein, 382 aa, Homo Sapiens
MNPQIRNPMERMYRDTFYDNFENEPILYGRSYTWLCYEVKIKRGRSNLLWDTGVFRGQVYFKPQYHAEMCFLSWFCGNQLPAYKCFQITWFVSWTPCPDCVAKLAEFLSEHPNVTLTISAARLYYYWERDYRRALCRLSQAGARVTIMDYEEFAYCWENFVYNEGQQFMPWYKFDENYAFLHRTLKEILRYLMDPDTFTFNFNNDPLVLRRRQTYLCYEVERLDNGTWVLMDQHMGFLCNEAKNLLCGFYGRHAELRFLDLVPSLQLDPAQIYRVTWFISWSPCFSWGCAGEVRAFLQENTHVRLRIFAARIYDYDPLYKEALQMLRDAGAQVSIMTYDEFEYCWDTFVYRQGCPFQPWDGLEEHSQALSGRLRAILQNQGN

SEQ ID NO: 305 - protein, 396 aa, Rattus norvegicus
MQPQGLGPNAGMGPVCLGCSHRRPYSPIRNPLKKLYQQTFYFHFKNVRYAWGRKNNFLCYEVNGMDCALPVPLRQGVFRKQGHIHAELCFIYWFHDKVLRVLSPMEEFKVTWYMSWSPCSKCAEQVARFLAAHRNLSLAIFSSRLYYYLRNPNYQQKLCRLIQEGVHVAAMDLPEFKKCWNKFVDNDGQPFRPWMRLRINFSFYDCKLQEIFSRMNLLREDVFYLQFNNSHRVKPVQNRYYRRKSYLCYQLERANGQEPLKGYLLYKKGEQHVEILFLEKMRSMELSQVRITCYLTWSPCPNCARQLAAFKKDHPDLILRIYTSRLYFYWRKKFQKGLCTLWRSGIHVDVMDLPQFADCWTNFVNPQRPFRPWNELEKNSWRIQRRLRRIKESWGL

SEQ ID NO: 306 - protein, 227 aa, Bos taurus
DGWEVAFRSGTVLKAGVLGVSMTEGWAGSGHPGQGACVWTPGTRNTMNLLREVLFKQQFGNQPRVPAPYYRRKTYLCYQLKQRNDLTLDRGCFRNKKQRHAEIRFIDKINSLDLNPSQSYKIICYITWSPCPNCANELVNFITRNNHLKLEIFASRLYFHWIKSFKMGLQDLQNAGISVAVMTHTEFEDCWEQFVDNQSRPFQPWDKLEQYSASIRRRLQRILTAPI

SEQ ID NO: 307 - protein, 490 aa, Pan troglodytes
MNPQIRNPMEWMYQRTFYYNFENEPILYGRSYTWLCYEVKIRRGHSNLLWDTGVFRGQMYSQPEHHAEMCFLSWFCGNQLSAYKCFQITWFVSWTPCPDCVAKLAKFLAEHPNVTLTISAARLYYYWERDYRRALCRLSQAGARVKIMDDEEFAYCWENFVYNEGQPFMPWYKFDDNYAFLHRTLKEIIRHLMDPDTFTFNFNNDPLVLRRHQTYLCYEVERLDNGTWVLMDQHMGFLCNEAKNLLCGFYGRHAELRFLDLVPSLQLDPAQIYRVTWFISWSPCFSWGCAGQVRAFLQENTHVRLRIFAARIYDYDPLYKEALQMLRDAGAQVSIMTYDEFEYCWDTFVYRQGCPFQPWDGLEEHSQALSGRLRAILQVRASSLCMVPHRPPPPPQSPGPCLPLCSEPPLGSLLPTGRPAPSLPFLLTASFSFPPPASLPPLPSLSLSPGHLPVPSFHSLTSCSIQPPCSSRIRETEGWASVSKEGRDLG

SEQ ID NO: 308 - protein, 190 aa, Homo Sapiens
MNPQIRNPMKAMYPGTFYFQFKNLWEANDRNETWLCFTVEGIKRRSVVSWKTGVFRNQVDSETHCHAERCFLSWFCDDILSPNTKYQVTWYTSWSPCPDCAGEVAEFLARHSNVNLTIFTARLYYFQYPCYQEGLRSLSQEGVAVEIMDYEDFKYCWENFVYNDNEPFKPWKGLKTNFRLLKRRLRESLQ

SEQ ID NO: 309 - protein, 190 aa, Gorilla beringei
MNPQIRNPMKAMYPGTFYFQFKNLWEANDRNETWLCFTVEGIKRRSVVSWKTGVFRNQVDSETHCHAERCFLSWFCDDILSPNTNYQVTWYTSWSPCPECAGEVAEFLARHSNVNLTIFTARLYYFQDTDYQEGLRSLSQEGVAVKIMDYKDFKYCWENFVYNDDEPFKPWKGLKYNFRFLKRRLQEILE

SEQ ID NO: 310 - protein, 199 aa, Homo Sapiens
MEASPASGPRHLMDPHIFTSNFNNGIGRHKTYLCYEVERLDNGTSVKMDQHRGFLHNQAKNLLCGFYGRHAELRFLDLVPSLQLDPAQIYRVTWFISWSPCFSWGCAGEVRAFLQENTHVRLRIFAARIYDYDPLYKEALQMLRDAGAQVSIMTYDEFKHCWDTFVDHQGCPFQPWDGLDEHSQALSGRLRAILQNQGN

SEQ ID NO: 311 - protein, 202 aa, Macaca mulatta
MDGSPASRPRHLMDPNTFTFNFNNDLSVRGRHQTYLCYEVERLDNGTWVPMDERRGFLCNKAKNVPCGDYGCHVELRFLCEVPSWQLDPAQTYRVTWFISWSPCFRRGCAGQVRVFLQENKHVRLRIFAARIYDYDPLYQEALRTLRDAGAQVSIMTYEEFKHCWDTFVDRQGRPFQPWDGLDEHSQALSGRLRAILQNQGN

SEQ ID NO: 312 - protein, 185 aa, Bos taurus
MDEYTFTENFNNQGWPSKTYLCYEMERLDGDATIPLDEYKGFVRNKGLDQPEKPCHAELYFLGKIHSWNLDRNQHYRLTCFISWSPCYDCAQKLTTFLKENHHISLHILASRIYTHNRFGCHQSGLCELQAAGARITIMTFEDFKHCWETFVDHKGKPFQPWEGLNVKSQALCTELQAILKTQQN

SEQ ID NO: 313 - protein, 200 aa, Homo Sapiens
MALLTAETFRLQFNNKRRLRRPYYPRKALLCYQLTPQNGSTPTRGYFENKKKCHAEICFINEIKSMGLDETQCYQVTCYLTWSPCSSCAWELVDFIKAHDHLNLGIFASRLYYHWCKPQQKGLRLLCGSQVPVEVMGFPKFADCWENFVDHEKPLSFNPYKMLEELDKNSRAIKRRLERIKIPGVRAQGRYMDILCDAEV

SEQ ID NO: 314 - protein, 210 aa, Macaca mulatta
MALLTAKTFSLQFNNKRRVNKPYYPRKALLCYQLTPQNGSTPTRGHLKNKKKDHAEIRFINKIKSMGLDETQCYQVTCYLTWSPCPSCAGELVDFIKAHRHLNLRIFASRLYYHWRPNYQEGLLLLCGSQVPVEVMGLPEFTDCWENFVDHKEPPSFNPSEKLEELDKNSQAIKRRLERIKSRSVDVLENGLRSLQLGPVTPSSSIRNSR

SEQ ID NO: 315 - protein, 386 aa, Homo Sapiens
MNPQIRNPMERMYRDTFYDNFENEPILYGRSYTWLCYEVKIKRGRSNLLWDTGVFRGPVLPKRQSNHRQEVYFRFENHAEMCFLSWFCGNRLPANRRFQITWFVSWNPCLPCVVKVTKFLAEHPNVTLTISAARLYYYRDRDWRWVLLRLHKAGARVKIMDYEDFAYCWENFVCNEGQPFMPWYKFDDNYASLHRTLKEILRNPMEAMYPHIFYFHFKNLLKACGRNESWLCFTMEVTKHHSAVFRKRGVFRNQVDPETHCHAERCFLSWFCDDILSPNTNYEVTWYTSWSPCPECAGEVAEFLARHSNVNLTIFTARLCYFWDTDYQEGLCSLSQEGASVKIMGYKDFVSCWKNFVYSDDEPFKPWKGLQTNFRLLKRRLREILQ

SEQ ID NO: 316 - protein, 236 aa, Homo Sapiens
MTSEKGPSTGDPTLRRRIEPWEFDVFYDPRELRKEACLLYEIKWGMSRKIWRSSGKNTTNHVEVNFIKKFTSERDFHPSMSCSITWFLSWSPCWECSQAIREFLSRHPGVTLVIYVARLFWHMDQQNRQGLRDLVNSGVTIQIMRASEYYHCWRNFVNYPPGDEAHWPQYPPLWMMLYALELHCIILSLPPCLKISRRWQNHLTFFRLHLQNCHYQTIPPHILLATGLIHPSVAWR

SEQ ID NO: 317 - protein, 229 aa, Mus musculus
MSSETGPVAVDPTLRRRIEPHEFEVFFDPRELRKETCLLYEINWGGRHSVWRHTSQNTSNHVEVNFLEKFTTERYFRPNTRCSITWFLSWSPCGECSRAITEFLSRHPYVTLFIYIARLYHHTDQRNRQGLRDLISSGVTIQIMTEQEYCYCWRNFVNYPPSNEAYWPRYPHLWVKLYVLELYCIILGLPPCLKILRRKQPQLTFFTITLQTCHYQRIPPHLLWATGLK

SEQ ID NO: 318 - protein, 229 aa, Rattus norvegicus [sequence omitted]

SEQ ID NO: 319 - protein, 224 aa, Homo Sapiens
MAQKEEAAVATEAASQNGEDLENLDDPEKLKELIELPPFEIVTGERLPANFFKFQFRNVEYSSGRNKTFLCYVVEAQGKGGQVQASRGYLEDEHAAAHAEEAFFNTILPAFDPALRYNVTWYVSSSPCAACADRIIKTLSKTKNLRLLILVGRLFMWEEPEIQAALKKLKEAGCKLRIMKPQDFEYVWQNFVEQEEGESKAFQPWEDIQENFLYYEEKLADILK

SEQ ID NO: 320 - protein, 224 aa, Mus musculus
MAQKEEAAEAAAPASQNGDDLENLEDPEKLKELIDLPPFEIVTGVRLPVNFFKFQFRNVEYSSGRNKTFLCYVVEVQSKGGQAQATQGYLEDEHAGAHAEEAFFNTILPAFDPALKYNVTWYVSSSPCAACADRILKTLSKTKNLRLLILVSRLFMWEEPEVQAALKKLKEAGCKLRIMKPQDFEYIWQNFVEQEEGESKAFEPWEDIQENFLYYEEKLADILK

SEQ ID NO: 321 - protein, 224 aa, Rattus norvegicus
MAQKEEAAEAAAPASQNGDDLENLEDPEKLKELIDLPPFEIVTGVRLPVNFFKFQFRNVEYSSGRNKTFLCYVVEAQSKGGQVQATQGYLEDEHAGAHAEEAFFNTILPAFDPALKYNVTWYVSSSPCAACADRILKTLSKTKNLRLLILVSRLFMWEEPEVQAALKKLKEAGCKLRIMKPQDFEYLWQNFVEQEEGESKAFEPWEDIQENFLYYEEKLADILK

SEQ ID NO: 322 - protein, 224 aa, Bos taurus
MAQKEEAAAAAEPASQNGEEVENLEDPEKLKELIELPPFEIVTGERLPAHYFKFQFRNVEYSSGRNKTFLCYVVEAQSKGGQVQASRGYLEDEHATNHAEEAFFNSIMPTFDPALRYMVTWYVSSSPCAACADRIVKTLNKTKNLRLLILVGRLFMWEEPEIQAALRKLKEAGCRLRIMKPQDFEYIWQNFVEQEEGESKAFEPWEDIQENFLYYEEKLADILK

SEQ ID NO: 323 - protein, 208 aa, Petromyzon marinus
MTDAEYVRIHEKLDIYTFKKQFFNNKKSVSHRCYVLFELKRRGERRACFWGYAVNKPQSGTERGIHAEIFSIRKVEEYLRDNPGQFTINWYSSWSPCADCAEKILEWYNQELRGNGHTLKIWACKLYYEKNARNQIGLWNLRDNGVGLNVMVSEHYQCCRKIFIQSSHNQLNENRWLEKTLKRAEKRRSELSIMIQVKILHTTKSPAV

SEQ ID NO: 324 - protein, 384 aa, Homo Sapiens
MKPHFRNTVERMYRDTFSYNFYNRPILSRRNTVWLCYEVKTKGPSRPPLDAKIFRGQVYSELKYHPEMRFFHWFSKWRKLHRDQEYEVTWYISWSPCTKCTRDMATFLAEDPKVTLTIFVARLYYFWDPDYQEALRSLCQKRDGPRATMKIMNYDEFQHCWSKFVYSQRELFEPWNNLPKYYILLHIMLGEILRHSMDPPTFTFNFNNEPWVRGRHETYLCYEVERMHNDTWVLLNQRRGFLCNQAPHKHGFLEGRHAELCFLDVIPFWKLDLDQDYRVTCFTSWSPCFSCAQEMAKFISKNKHVSLCIFTARIYRRQGRCQEGLRTLAEAGAKISIMTYSEFKHCWDTFVDHQGCPFQPWDGLDEHSQDLSGRLRAILQNQEN

SEQ ID NO: 325 - protein, 184 aa, Homo Sapiens
MDPPTFTFNFNNEPWVRGRHETYLCYEVERMHNDTWVLLNQRRGFLCNQAPHKHGFLEGRHAELCFLDVIPFWKLDLDQDYRVTCFTSWSPCFSCAQEMAKFISKNKHVSLCIFTARIYDDQGRCQEGLRTLAEAGAKISIMTYSEFKHCWDTFVDHQGCPFQPWDGLDEHSQDLSGRLRAILQ

SEQ ID NO: 326 - protein, 184 aa, Homo Sapiens
MDPPTFTFNFNNEPWVRGRHETYLCYEVERMHNDTWVLLNQRRGFLCNQAPHKHGFLEGRHAELCFLDVIPFWKLDLDQDYRVTCFTSWSPCFSCAQEMAKFISKNKHVSLCIFTARIYRRQGRCQEGLRTLAEAGAKISIMTYSEFKHCWDTFVDHQGCPFQPWDGLDEHSQDLSGRLRAILQ

SEQ ID NO: 327 - protein, 162 aa, Artificial Sequence
  Synthetic
MFERNYDPRELRKETYLLYEIKWGKSGKLWRHWCQNNRTQHAEVYFLENIFNARRFNPSTHCSITWYLSWSPCAECSQKIVDFLKEHPNVNLEIYVARLYYHEDERNRQGLRDLVNSGVTIRIMDLPDYNYCWKTFVSDQGGDEDYWPGHFAPWIKQYSLKL

SEQ ID NO: 328 - protein, 162 aa, Artificial Sequence
  Synthetic
MFERNYDPRELRKETYLLYEIKWGKSGKLWRHWCQNNRTQHAEVYFLENIFNARRFNPSTHCSITWYLSWSPCAECSQKIVDFLKEHPNVNLEIYVARLYYPENERNRQGLRDLVNSGVTIRIMDLPDYNYCWKTFVSDQGGDEDYWPGHFAPWIKQYSLKL

SEQ ID NO: 329 - protein, 229 aa, Rattus norvegicus [sequence omitted]

SEQ ID NO: 330 - protein, 229 aa, Artificial Sequence
  Synthetic
MSSKTGPVAVDPTLRRRIEPHEFEVFFDPRELRKETCLLYEINWGGRHSIWRHTSQNTNKHVEVNFIEKFTTERYFCPNTRCSITWFLSWSPCGECSRAITEFLSRYPNVTLFIYIARLYHLANPRNRQGLRDLISSGVTIQIMTEQESGYCWHNFVNYSPSNESHWPRYPHLWVRLYVLELYCIILGLPPCLNILRRKQSQLTSFTIALQSCHYQRLPPHILWATGLK

SEQ ID NO: 331 - protein, 208 aa, Petromyzon marinus; identical to SEQ ID NO: 323

SEQ ID NO: 332 - protein, 208 aa, Artificial Sequence
  Synthetic
MTDAEYVRIHEKLDIYTFKKQFSNNKKSVSHRCYVLFELKRRGERRACFWGYAVNKPQSGTERGIHAEIFSIRKVEEYLRDNPGQFTINWYSSWSPCADCAEKILEWYNQELRGNGHTLKIWVCKLYYEKNARNQIGLWNLRDNGVGLNVMVSEHYQCCRKIFIQSSHNQLNENRWLEKTLKRAEKRRSELSIMFQVKILHTTKSPAV

SEQ ID NO: 333 - protein, 229 aa, Artificial Sequence
  Synthetic
MSSETGPVAVDPTLRRRIEPHEFEVFFDPRELRKETCLLYEIKWGTSHKIWRHSSKNTTKHVEVNFIEKFTSERHFCPSTSCSITWFLSWSPCGECSKAITEFLSQHPNVTLVIYVARLYHHMDQQNRQGLRDLVNSGVTIQIMTAPEYDYCWRNFVNYPPGKEAHWPRYPPLWMKLYALELHAGILGLPPCLNILRRKQPQLTFFTIALQSCHYQRLPPHILWATGLK

SEQ ID NO: 334 - protein, 229 aa, Artificial Sequence
  Synthetic
MSSKTGPVAVDPTLRRRIEPHEFEVFFDPRELRKETCLLYEIKWGTSHKIWRHSSKNTTKHVEVNFIEKFTSERHFCPSTSCSITWFLSWSPCGECSKAITEFLSQHPNVTLVIYVARLYHLMNQQNRQGLRDLVNSGVTIQIMTAPEYDYCWHNFVNYPPGKESHWPRYPPLWMKLYALELHAGILGLPPCLNILRRKQSQLTSFTIALQSCHYQRLPPHILWATGLK

SEQ ID NO: 335 - protein, 16 aa, Artificial Sequence
  Synthetic
  misc_feature (3)..(12): Xaa can be any naturally occurring amino acid
KRXXXXXXXXXXKKKL

SEQ ID NO: 336 - skipped

SEQ ID NO: 337 - protein, 7 aa, Artificial Sequence
  Synthetic
PKKKRKV

SEQ ID NO: 338 - protein, 8 aa, Artificial Sequence
  Synthetic
VSRKRPRP

SEQ ID NO: 339 - protein, 9 aa, Artificial Sequence
  Synthetic
PAAKRVKLD

SEQ ID NO: 340 - protein, 9 aa, Artificial Sequence
  Synthetic
KLKIKRPVK

SEQ ID NO: 341 - protein, 10 aa, Artificial Sequence
  Synthetic
EGAPPAKRAR

SEQ ID NO: 342 - protein, 12 aa, Artificial Sequence
  Synthetic
PPQPKKKPLDGE

SEQ ID NO: 343 - protein, 19 aa, Artificial Sequence
  Synthetic
MKRTADGSEFESPKKKRKV

SEQ ID NO: 344 - protein, 20 aa, Artificial Sequence
  Synthetic
AVKRPAATKKAGQAKKKKLD

SEQ ID NO: 345 - protein, 21 aa, Artificial Sequence
  Synthetic
SGGSKRTADGSEFEPKKKRKV

SEQ ID NO: 346 - protein, 25 aa, Artificial Sequence
  Synthetic
MSRRRKANPTKLSENAKKLAKEVEN

SEQ ID NO: 347 - protein, 19 aa, Artificial Sequence
  Synthetic
NLSKRPAAIKKAGQAKKKK

SEQ ID NO: 348 - protein, 11 aa, Artificial Sequence
  Synthetic
RQRRNELKRSF

SEQ ID NO: 349 - protein, 38 aa, Artificial Sequence
  Synthetic
NQSSNFGPMKGGNFGGRSSGPYGGGGQYFAKPRNQGGY

SEQ ID NO: 350 - protein, 1853 aa, Artificial Sequence
  Synthetic
MKRTADGSEFESPKKKRKVSSETGPVAVDPTLRRRIEPHEFEVFFDPRELRKETCLLYEINWGGRHSIWRHTSQNTNKHVEVNFIEKFTTERYFCPNTRCSITWFLSWSPCGECSRAITEFLSRYPHVTLFIYIARLYHHADPRNRQGLRDLISSGVTIQIMTEQESGYCWRNFVNYSPSNEAHWPRYPHLWVRLYVLELYCIILGLPPCLNILRRKQPQLTFFTIALQSCHYQRLPPHILWATGLKSGGSSGGSSGSETPGTSESATPESSGGSSGGSDKKYSIGLAIGTNSVGWAVITDEYKVPSKKFKVLGNTDRHSIKKNLIGALLFDSGETAEATRLKRTARRRYTRRKNRICYLQEIFSNEMAKVDDSFFHRLEESFLVEEDKKHERHPIFGNIVDEVAYHEKYPTIYHLRKKLVDSTDKADLRLIYLALAHMIKFRGHFLIEGDLNPDNSDVDKLFIQLVQTYNQLFEENPINASGVDAKAILSARLSKSRRLENLIAQLPGEKKNGLFGNLIALSLGLTPNFKSNFDLAEDAKLQLSKDTYDDDLDNLLAQIGDQYADLFLAAKNLSDAILLSDILRVNTEITKAPLSASMIKRYDEHHQDLTLLKALVRQQLPEKYKEIFFDQSKNGYAGYIDGGASQEEFYKFIKPILEKMDGTEELLVKLNREDLLRKQRTFDNGSIPHQIHLGELHAILRRQEDFYPFLKDNREKIEKILTFRIPYYVGPLARGNSRFAWMTRKSEETITPWNFEEVVDKGASAQSFIERMTNFDKNLPNEKVLPKHSLLYEYFTVYNELTKVKYVTEGMRKPAFLSGEQKKAIVDLLFKTNRKVTVKQLKEDYFKKIECFDSVEISGVEDRFNASLGTYHDLLKIIKDKDFLDNEENEDILEDIVLTLTLFEDREMIEERLKTYAHLFDDKVMKQLKRRRYTGWGRLSRKLINGIRDKQSGKTILDFLKSDGFANRNFMQLIHDDSLTFKEDIQKAQVSGQGDSLHEHIANLAGSPAIKKGILQTVKVVDELVKVMGRHKPENIVIEMARENQTTQKGQKNSRERMKRIEEGIKELGSQILKEHPVENTQLQNEKLYLYYLQNGRDMYVDQELDINRLSDYDVDHIVPQSFLKDDSIDNKVLTRSDKNRGKSDNVPSEEVVKKMKNYWRQLLNAKLITQRKFDNLTKAERGGLSELDKAGFIKRQLVETRQITKHVAQILDSRMNTKYDENDKLIREVKVITLKSKLVSDFRKDFQFYKVREINNYHHAHDAYLNAVVGTALIKKYPKLESEFVYGDYKVYDVRKMIAKSEQEIGKATAKYFFYSNIMNFFKTEITLANGEIRKRPLIETNGETGEIVWDKGRDFATVRKVLSMPQVNIVKKTEVQTGGFSKESILPKRNSDKLIARKKDWDPKKYGGFDSPTVAYSVLVVAKVEKGKSKKLKSVKELLGITIMERSSFEKNPIDFLEAKGYKEVKKDLIIKLPKYSLFELENGRKRMLASAGELQKGNELALPSKYVNFLYLASHYEKLKGSPEDNEQKQLFVEQHKHYLDEIIEQISEFSKRVILADANLDKVLSAYNKHRDKPIREQAENIIHLFTLTNLGAPAAFKYFDTTIDRKRYTSTKEVLDATLIHQSITGLYETRIDLSQLGGDSGGSGGSGGSTNLSDIIEKETGKQLVIQESILMLPEEVEEVIGNKPESDILVHTAYDESTDENVMLLTSDAPEYKPWALVIQDSNGENKIKMLSGGSGGSGGSTNLSDIIEKETGKQLVIQESILMLPEEVEEVIGNKPESDILVHTAYDESTDENVMLLTSDAPEYKPWALVIQDSNGENKIKMLSGGSKRTADGSEFEPKKKRKV

SEQ ID NO: 351 - protein, 1853 aa, Artificial Sequence
  Synthetic
MKRTADGSEFESPKKKRKVSSETGPVAVDPTLRRRIEPHEFEVFFDPRELRKETCLLYEINWGGRHSIWRHTSQNTNKHVEVNFIEKFTTERYFCPNTRCSITWFLSYSPCGECSRAITEFLSRYPHVTLFIYIARLYHHADPENRQGLRDLISSGVTIQIMTEQESGYCWRNFVNYSPSNEAHWPRYPHLWVRLYVLELYCIILGLPPCLNILRRKQPQLTFFTIALQSCHYQRLPPHILWATGLKSGGSSGGSSGSETPGTSESATPESSGGSSGGSDKKYSIGLAIGTNSVGWAVITDEYKVPSKKFKVLGNTDRHSIKKNLIGALLFDSGETAEATRLKRTARRRYTRRKNRICYLQEIFSNEMAKVDDSFFHRLEESFLVEEDKKHERHPIFGNIVDEVAYHEKYPTIYHLRKKLVDSTDKADLRLIYLALAHMIKFRGHFLIEGDLNPDNSDVDKLFIQLVQTYNQLFEENPINASGVDAKAILSARLSKSRRLENLIAQLPGEKKNGLFGNLIALSLGLTPNFKSNFDLAEDAKLQLSKDTYDDDLDNLLAQIGDQYADLFLAAKNLSDAILLSDILRVNTEITKAPLSASMIKRYDEHHQDLTLLKALVRQQLPEKYKEIFFDQSKNGYAGYIDGGASQEEFYKFIKPILEKMDGTEELLVKLNREDLLRKQRTFDNGSIPHQIHLGELHAILRRQEDFYPFLKDNREKIEKILTFRIPYYVGPLARGNSRFAWMTRKSEETITPWNFEEVVDKGASAQSFIERMTNFDKNLPNEKVLPKHSLLYEYFTVYNELTKVKYVTEGMRKPAFLSGEQKKAIVDLLFKTNRKVTVKQLKEDYFKKIECFDSVEISGVEDRFNASLGTYHDLLKIIKDKDFLDNEENEDILEDIVLTLTLFEDREMIEERLKTYAHLFDDKVMKQLKRRRYTGWGRLSRKLINGIRDKQSGKTILDFLKSDGFANRNFMQLIHDDSLTFKEDIQKAQVSGQGDSLHEHIANLAGSPAIKKGILQTVKVVDELVKVMGRHKPENIVIEMARENQTTQKGQKNSRERMKRIEEGIKELGSQILKEHPVENTQLQNEKLYLYYLQNGRDMYVDQELDINRLSDYDVDHIVPQSFLKDDSIDNKVLTRSDKNRGKSDNVPSEEVVKKMKNYWRQLLNAKLITQRKFDNLTKAERGGLSELDKAGFIKRQLVETRQITKHVAQILDSRMNTKYDENDKLIREVKVITLKSKLVSDFRKDFQFYKVREINNYHHAHDAYLNAVVGTALIKKYPKLESEFVYGDYKVYDVRKMIAKSEQEIGKATAKYFFYSNIMNFFKTEITLANGEIRKRPLIETNGETGEIVWDKGRDFATVRKVLSMPQVNIVKKTEVQTGGFSKESILPKRNSDKLIARKKDWDPKKYGGFDSPTVAYSVLVVAKVEKGKSKKLKSVKELLGITIMERSSFEKNPIDFLEAKGYKEVKKDLIIKLPKYSLFELENGRKRMLASAGELQKGNELALPSKYVNFLYLASHYEKLKGSPEDNEQKQLFVEQHKHYLDEIIEQISEFSKRVILADANLDKVLSAYNKHRDKPIREQAENIIHLFTLTNLGAPAAFKYFDTTIDRKRYTSTKEVLDATLIHQSITGLYETRIDLSQLGGDSGGSGGSGGSTNLSDIIEKETGKQLVIQESILMLPEEVEEVIGNKPESDILVHTAYDESTDENVMLLTSDAPEYKPWALVIQDSNGENKIKMLSGGSGGSGGSTNLSDIIEKETGKQLVIQESILMLPEEVEEVIGNKPESDILVHTAYDESTDENVMLLTSDAPEYKPWALVIQDSNGENKIKMLSGGSKRTADGSEFEPKKKRKV

SEQ ID NO: 352 - protein, 1853 aa, Artificial Sequence
  Synthetic
MKRTADGSEFESPKKKRKVSSETGPVAVDPTLRRRIEPHEFEVFFDPRELRKETCLLYEINWGGRHSIWRHTSQNTNKHVEVNFIEKFTTERYFCPNTRCSITWFLSYSPCGECSRAITEFLSRYPHVTLFIYIARLYHHADPRNRQGLEDLISSGVTIQIMTEQESGYCWRNFVNYSPSNEAHWPRYPHLWVRLYVLELYCIILGLPPCLNILRRKQPQLTFFTIALQSCHYQRLPPHILWATGLKSGGSSGGSSGSETPGTSESATPESSGGSSGGSDKKYSIGLAIGTNSVGWAVITDEYKVPSKKFKVLGNTDRHSIKKNLIGALLFDSGETAEATRLKRTARRRYTRRKNRICYLQEIFSNEMAKVDDSFFHRLEESFLVEEDKKHERHPIFGNIVDEVAYHEKYPTIYHLRKKLVDSTDKADLRLIYLALAHMIKFRGHFLIEGDLNPDNSDVDKLFIQLVQTYNQLFEENPINASGVDAKAILSARLSKSRRLENLIAQLPGEKKNGLFGNLIALSLGLTPNFKSNFDLAEDAKLQLSKDTYDDDLDNLLAQIGDQYADLFLAAKNLSDAILLSDILRVNTEITKAPLSASMIKRYDEHHQDLTLLKALVRQQLPEKYKEIFFDQSKNGYAGYIDGGASQEEFYKFIKPILEKMDGTEELLVKLNREDLLRKQRTFDNGSIPHQIHLGELHAILRRQEDFYPFLKDNREKIEKILTFRIPYYVGPLARGNSRFAWMTRKSEETITPWNFEEVVDKGASAQSFIERMTNFDKNLPNEKVLPKHSLLYEYFTVYNELTKVKYVTEGMRKPAFLSGEQKKAIVDLLFKTNRKVTVKQLKEDYFKKIECFDSVEISGVEDRFNASLGTYHDLLKIIKDKDFLDNEENEDILEDIVLTLTLFEDREMIEERLKTYAHLFDDKVMKQLKRRRYTGWGRLSRKLINGIRDKQSGKTILDFLKSDGFANRNFMQLIHDDSLTFKEDIQKAQVSGQGDSLHEHIANLAGSPAIKKGILQTVKVVDELVKVMGRHKPENIVIEMARENQTTQKGQKNSRERMKRIEEGIKELGSQILKEHPVENTQLQNEKLYLYYLQNGRDMYVDQELDINRLSDYDVDHIVPQSFLKDDSIDNKVLTRSDKNRGKSDNVPSEEVVKKMKNYWRQLLNAKLITQRKFDNLTKAERGGLSELDKAGFIKRQLVETRQITKHVAQILDSRMNTKYDENDKLIREVKVITLKSKLVSDFRKDFQFYKVREINNYHHAHDAYLNAVVGTALIKKYPKLESEFVYGDYKVYDVRKMIAKSEQEIGKATAKYFFYSNIMNFFKTEITLANGEIRKRPLIETNGETGEIVWDKGRDFATVRKVLSMPQVNIVKKTEVQTGGFSKESILPKRNSDKLIARKKDWDPKKYGGFDSPTVAYSVLVVAKVEKGKSKKLKSVKELLGITIMERSSFEKNPIDFLEAKGYKEVKKDLIIKLPKYSLFELENGRKRMLASAGELQKGNELALPSKYVNFLYLASHYEKLKGSPEDNEQKQLFVEQHKHYLDEIIEQISEFSKRVILADANLDKVLSAYNKHRDKPIREQAENIIHLFTLTNLGAPAAFKYFDTTIDRKRYTSTKEVLDATLIHQSITGLYETRIDLSQLGGDSGGSGGSGGSTNLSDIIEKETGKQLVIQESILMLPEEVEEVIGNKPESDILVHTAYDESTDENVMLLTSDAPEYKPWALVIQDSNGENKIKMLSGGSGGSGGSTNLSDIIEKETGKQLVIQESILMLPEEVEEVIGNKPESDILVHTAYDESTDENVMLLTSDAPEYKPWALVIQDSNGENKIKMLSGGSKRTADGSEFEPKKKRKV

SEQ ID NO: 353 - protein, 1853 aa, Artificial Sequence
  Synthetic
MKRTADGSEFESPKKKRKVSSETGPVAVDPTLRRRIEPHEFEVFFDPRELRKETCLLYEINWGGRHSIWRHTSQNTNKHVEVNFIEKFTTERYFCPNTRCSITWFLSYSPCGECSRAITEFLSRYPHVTLFIYIARLYHHADPENRQGLEDLISSGVTIQIMTEQESGYCWRNFVNYSPSNEAHWPRYPHLWVRLYVLELYCIILGLPPCLNILRRKQPQLTFFTIALQSCHYQRLPPHILWATGLKSGGSSGGSSGSETPGTSESATPESSGGSSGGSDKKYSIGLAIGTNSVGWAVITDEYKVPSKKFKVLGNTDRHSIKKNLIGALLFDSGETAEATRLKRTARRRYTRRKNRICYLQEIFSNEMAKVDDSFFHRLEESFLVEEDKKHERHPIFGNIVDEVAYHEKYPTIYHLRKKLVDSTDKADLRLIYLALAHMIKFRGHFLIEGDLNPDNSDVDKLFIQLVQTYNQLFEENPINASGVDAKAILSARLSKSRRLENLIAQLPGEKKNGLFGNLIALSLGLTPNFKSNFDLAEDAKLQLSKDTYDDDLDNLLAQIGDQYADLFLAAKNLSDAILLSDILRVNTEITKAPLSASMIKRYDEHHQDLTLLKALVRQQLPEKYKEIFFDQSKNGYAGYIDGGASQEEFYKFIKPILEKMDGTEELLVKLNREDLLRKQRTFDNGSIPHQIHLGELHAILRRQEDFYPFLKDNREKIEKILTFRIPYYVGPLARGNSRFAWMTRKSEETITPWNFEEVVDKGASAQSFIERMTNFDKNLPNEKVLPKHSLLYEYFTVYNELTKVKYVTEGMRKPAFLSGEQKKAIVDLLFKTNRKVTVKQLKEDYFKKIECFDSVEISGVEDRFNASLGTYHDLLKIIKDKDFLDNEENEDILEDIVLTLTLFEDREMIEERLKTYAHLFDDKVMKQLKRRRYTGWGRLSRKLINGIRDKQSGKTILDFLKSDGFANRNFMQLIHDDSLTFKEDIQKAQVSGQGDSLHEHIANLAGSPAIKKGILQTVKVVDELVKVMGRHKPENIVIEMARENQTTQKGQKNSRERMKRIEEGIKELGSQILKEHPVENTQLQNEKLYLYYLQNGRDMYVDQELDINRLSDYDVDHIVPQSFLKDDSIDNKVLTRSDKNRGKSDNVPSEEVVKKMKNYWRQLLNAKLITQRKFDNLTKAERGGLSELDKAGFIKRQLVETRQITKHVAQILDSRMNTKYDENDKLIREVKVITLKSKLVSDFRKDFQFYKVREINNYHHAHDAYLNAVVGTALIKKYPKLESEFVYGDYKVYDVRKMIAKSEQEIGKATAKYFFYSNIMNFFKTEITLANGEIRKRPLIETNGETGEIVWDKGRDFATVRKVLSMPQVNIVKKTEVQTGGFSKESILPKRNSDKLIARKKDWDPKKYGGFDSPTVAYSVLVVAKVEKGKSKKLKSVKELLGITIMERSSFEKNPIDFLEAKGYKEVKKDLIIKLPKYSLFELENGRKRMLASAGELQKGNELALPSKYVNFLYLASHYEKLKGSPEDNEQKQLFVEQHKHYLDEIIEQISEFSKRVILADANLDKVLSAYNKHRDKPIREQAENIIHLFTLTNLGAPAAFKYFDTTIDRKRYTSTKEVLDATLIHQSITGLYETRIDLSQLGGDSGGSGGSGGSTNLSDIIEKETGKQLVIQESILMLPEEVEEVIGNKPESDILVHTAYDESTDENVMLLTSDAPEYKPWALVIQDSNGENKIKMLSGGSGGSGGSTNLSDIIEKETGKQLVIQESILMLPEEVEEVIGNKPESDILVHTAYDESTDENVMLLTSDAPEYKPWALVIQDSNGENKIKMLSGGSKRTADGSEFEPKKKRKV

SEQ ID NO: 354 - protein, 1853 aa, Artificial Sequence
  Synthetic
MKRTADGSEFESPKKKRKVSSETGPVAVDPTLRRRIEPHEFEVFFDPRELRKETCLLYEINWGGRHSIWRHTSQNTNKHVEVNFIEKFTTERYFCPNTRCSITWFLSWSPCGECSRAITEFLSRYPHVTLFIYIARLYHHADPENRQGLEDLISSGVTIQIMTEQESGYCWRNFVNYSPSNEAHWPRYPHLWVRLYVLELYCIILGLPPCLNILRRKQPQLTFFTIALQSCHYQRLPPHILWATGLKSGGSSGGSSGSETPGTSESATPESSGGSSGGSDKKYSIGLAIGTNSVGWAVITDEYKVPSKKFKVLGNTDRHSIKKNLIGALLFDSGETAEATRLKRTARRRYTRRKNRICYLQEIFSNEMAKVDDSFFHRLEESFLVEEDKKHERHPIFGNIVDEVAYHEKYPTIYHLRKKLVDSTDKADLRLIYLALAHMIKFRGHFLIEGDLNPDNSDVDKLFIQLVQTYNQLFEENPINASGVDAKAILSARLSKSRRLENLIAQLPGEKKNGLFGNLIALSLGLTPNFKSNFDLAEDAKLQLSKDTYDDDLDNLLAQIGDQYADLFLAAKNLSDAILLSDILRVNTEITKAPLSASMIKRYDEHHQDLTLLKALVRQQLPEKYKEIFFDQSKNGYAGYIDGGASQEEFYKFIKPILEKMDGTEELLVKLNREDLLRKQRTFDNGSIPHQIHLGELHAILRRQEDFYPFLKDNREKIEKILTFRIPYYVGPLARGNSRFAWMTRKSEETITPWNFEEVVDKGASAQSFIERMTNFDKNLPNEKVLPKHSLLYEYFTVYNELTKVKYVTEGMRKPAFLSGEQKKAIVDLLFKTNRKVTVKQLKEDYFKKIECFDSVEISGVEDRFNASLGTYHDLLKIIKDKDFLDNEENEDILEDIVLTLTLFEDREMIEERLKTYAHLFDDKVMKQLKRRRYTGWGRLSRKLINGIRDKQSGKTILDFLKSDGFANRNFMQLIHDDSLTFKEDIQKAQVSGQGDSLHEHIANLAGSPAIKKGILQTVKVVDELVKVMGRHKPENIVIEMARENQTTQKGQKNSRERMKRIEEGIKELGSQILKEHPVENTQLQNEKLYLYYLQNGRDMYVDQELDINRLSDYDVDHIVPQSFLKDDSIDNKVLTRSDKNRGKSDNVPSEEVVKKMKNYWRQLLNAKLITQRKFDNLTKAERGGLSELDKAGFIKRQLVETRQITKHVAQILDSRMNTKYDENDKLIREVKVITLKSKLVSDFRKDFQFYKVREINNYHHAHDAYLNAVVGTALIKKYPKLESEFVYGDYKVYDVRKMIAKSEQEIGKATAKYFFYSNIMNFFKTEITLANGEIRKRPLIETNGETGEIVWDKGRDFATVRKVLSMPQVNIVKKTEVQTGGFSKESILPKRNSDKLIARKKDWDPKKYGGFDSPTVAYSVLVVAKVEKGKSKKLKSVKELLGITIMERSSFEKNPIDFLEAKGYKEVKKDLIIKLPKYSLFELENGRKRMLASAGELQKGNELALPSKYVNFLYLASHYEKLKGSPEDNEQKQLFVEQHKHYLDEIIEQISEFSKRVILADANLDKVLSAYNKHRDKPIREQAENIIHLFTLTNLGAPAAFKYFDTTIDRKRYTSTKEVLDATLIHQSITGLYETRIDLSQLGGDSGGSGGSGGSTNLSDIIEKETGKQLVIQESILMLPEEVEEVIGNKPESDILVHTAYDESTDENVMLLTSDAPEYKPWALVIQDSNGENKIKMLSGGSGGSGGSTNLSDIIEKETGKQLVIQESILMLPEEVEEVIGNKPESDILVHTAYDESTDENVMLLTSDAPEYKPWALVIQDSNGENKIKMLSGGSKRTADGSEFEPKKKRKV

SEQ ID NO: 355 - protein, 1853 aa, Artificial Sequence
  Synthetic
MKRTADGSEFESPKKKRKVSSETGPVAVDPTLRRRIEPHEFEVFFDPRELAKETCLLYEINWGGRHSIWRHTSQNTNKHVEVNFIEKFTTERYFCPNTRCSITWFLSWSPCGECSRAITEFLSRYPHVTLFIYIARLYHHADPRNRQGLRDLISSGVTIQIMTEQESGYCWRNFVNYSPSNEAHWPRYPHLWVRLYVLELYCIILGLPPCLNILRRKQPQLTFFTIALQSCHYQRLPPHILWATGLKSGGSSGGSSGSETPGTSESATPESSGGSSGGSDKKYSIGLAIGTNSVGWAVITDEYKVPSKKFKVLGNTDRHSIKKNLIGALLFDSGETAEATRLKRTARRRYTRRKNRICYLQEIFSNEMAKVDDSFFHRLEESFLVEEDKKHERHPIFGNIVDEVAYHEKYPTIYHLRKKLVDSTDKADLRLIYLALAHMIKFRGHFLIEGDLNPDNSDVDKLFIQLVQTYNQLFEENPINASGVDAKAILSARLSKSRRLENLIAQLPGEKKNGLFGNLIALSLGLTPNFKSNFDLAEDAKLQLSKDTYDDDLDNLLAQIGDQYADLFLAAKNLSDAILLSDILRVNTEITKAPLSASMIKRYDEHHQDLTLLKALVRQQLPEKYKEIFFDQSKNGYAGYIDGGASQEEFYKFIKPILEKMDGTEELLVKLNREDLLRKQRTFDNGSIPHQIHLGELHAILRRQEDFYPFLKDNREKIEKILTFRIPYYVGPLARGNSRFAWMTRKSEETITPWNFEEVVDKGASAQSFIERMTNFDKNLPNEKVLPKHSLLYEYFTVYNELTKVKYVTEGMRKPAFLSGEQKKAIVDLLFKTNRKVTVKQLKEDYFKKIECFDSVEISGVEDRFNASLGTYHDLLKIIKDKDFLDNEENEDILEDIVLTLTLFEDREMIEERLKTYAHLFDDKVMKQLKRRRYTGWGRLSRKLINGIRDKQSGKTILDFLKSDGFANRNFMQLIHDDSLTFKEDIQKAQVSGQGDSLHEHIANLAGSPAIKKGILQTVKVVDELVKVMGRHKPENIVIEMARENQTTQKGQKNSRERMKRIEEGIKELGSQILKEHPVENTQLQNEKLYLYYLQNGRDMYVDQELDINRLSDYDVDHIVPQSFLKDDSIDNKVLTRSDKNRGKSDNVPSEEVVKKMKNYWRQLLNAKLITQRKFDNLTKAERGGLSELDKAGFIKRQLVETRQITKHVAQILDSRMNTKYDENDKLIREVKVITLKSKLVSDFRKDFQFYKVREINNYHHAHDAYLNAVVGTALIKKYPKLESEFVYGDYKVYDVRKMIAKSEQEIGKATAKYFFYSNIMNFFKTEITLANGEIRKRPLIETNGETGEIVWDKGRDFATVRKVLSMPQVNIVKKTEVQTGGFSKESILPKRNSDKLIARKKDWDPKKYGGFDSPTVAYSVLVVAKVEKGKSKKLKSVKELLGITIMERSSFEKNPIDFLEAKGYKEVKKDLIIKLPKYSLFELENGRKRMLASAGELQKGNELALPSKYVNFLYLASHYEKLKGSPEDNEQKQLFVEQHKHYLDEIIEQISEFSKRVILADANLDKVLSAYNKHRDKPIREQAENIIHLFTLTNLGAPAAFKYFDTTIDRKRYTSTKEVLDATLIHQSITGLYETRIDLSQLGGDSGGSGGSGGSTNLSDIIEKETGKQLVIQESILMLPEEVEEVIGNKPESDILVHTAYDESTDENVMLLTSDAPEYKPWALVIQDSNGENKIKMLSGGSGGSGGSTNLSDIIEKETGKQLVIQESILMLPEEVEEVIGNKPESDILVHTAYDESTDENVMLLTSDAPEYKPWALVIQDSNGENKIKMLSGGSKRTADGSEFEPKKKRKV

SEQ ID NO: 356 - protein, 1853 aa, Artificial Sequence
  Synthetic
MKRTADGSEFESPKKKRKVSSETGPVAVDPTLRRRIEPHEFEVFFDPRELAAETCLLYEINWGGRHSIWRHTSQNTNKHVEVNFIEKFTTERYFCPNTRCSITWFLSWSPCGECSRAITEFLSRYPHVTLFIYIARLYHHADPRNRQGLRDLISSGVTIQIMTEQESGYCWRNFVNYSPSNEAHWPRYPHLWVRLYVLELYCIILGLPPCLNILRRKQPQLTFFTIALQSCHYQRLPPHILWATGLKSGGSSGGSSGSETPGTSESATPESSGGSSGGSDKKYSIGLAIGTNSVGWAVITDEYKVPSKKFKVLGNTDRHSIKKNLIGALLFDSGETAEATRLKRTARRRYTRRKNRICYLQEIFSNEMAKVDDSFFHRLEESFLVEEDKKHERHPIFGNIVDEVAYHEKYPTIYHLRKKLVDSTDKADLRLIYLALAHMIKFRGHFLIEGDLNPDNSDVDKLFIQLVQTYNQLFEENPINASGVDAKAILSARLSKSRRLENLIAQLPGEKKNGLFGNLIALSLGLTPNFKSNFDLAEDAKLQLSKDTYDDDLDNLLAQIGDQYADLFLAAKNLSDAILLSDILRVNTEITKAPLSASMIKRYDEHHQDLTLLKALVRQQLPEKYKEIFFDQSKNGYAGYIDGGASQEEFYKFIKPILEKMDGTEELLVKLNREDLLRKQRTFDNGSIPHQIHLGELHAILRRQEDFYPFLKDNREKIEKILTFRIPYYVGPLARGNSRFAWMTRKSEETITPWNFEEVVDKGASAQSFIERMTNFDKNLPNEKVLPKHSLLYEYFTVYNELTKVKYVTEGMRKPAFLSGEQKKAIVDLLFKTNRKVTVKQLKEDYFKKIECFDSVEISGVEDRFNASLGTYHDLLKIIKDKDFLDNEENEDILEDIVLTLTLFEDREMIEERLKTYAHLFDDKVMKQLKRRRYTGWGRLSRKLINGIRDKQSGKTILDFLKSDGFANRNFMQLIHDDSLTFKEDIQKAQVSGQGDSLHEHIANLAGSPAIKKGILQTVKVVDELVKVMGRHKPENIVIEMARENQTTQKGQKNSRERMKRIEEGIKELGSQILKEHPVENTQLQNEKLYLYYLQNGRDMYVDQELDINRLSDYDVDHIVPQSFLKDDSIDNKVLTRSDKNRGKSDNVPSEEVVKKMKNYWRQLLNAKLITQRKFDNLTKAERGGLSELDKAGFIKRQLVETRQITKHVAQILDSRMNTKYDENDKLIREVKVITLKSKLVSDFRKDFQFYKVREINNYHHAHDAYLNAVVGTALIKKYPKLESEFVYGDYKVYDVRKMIAKSEQEIGKATAKYFFYSNIMNFFKTEITLANGEIRKRPLIETNGETGEIVWDKGRDFATVRKVLSMPQVNIVKKTEVQTGGFSKESILPKRNSDKLIARKKDWDPKKYGGFDSPTVAYSVLVVAKVEKGKSKKLKSVKELLGITIMERSSFEKNPIDFLEAKGYKEVKKDLIIKLPKYSLFELENGRKRMLASAGELQKGNELALPSKYVNFLYLASHYEKLKGSPEDNEQKQLFVEQHKHYLDEIIEQISEFSKRVILADANLDKVLSAYNKHRDKPIREQAENIIHLFTLTNLGAPAAFKYFDTTIDRKRYTSTKEVLDATLIHQSITGLYETRIDLSQLGGDSGGSGGSGGSTNLSDIIEKETGKQLVIQESILMLPEEVEEVIGNKPESDILVHTAYDESTDENVMLLTSDAPEYKPWALVIQDSNGENKIKMLSGGSGGSGGSTNLSDIIEKETGKQLVIQESILMLPEEVEEVIGNKPESDILVHTAYDESTDENVMLLTSDAPEYKPWALVIQDSNGENKIKMLSGGSKRTADGSEFEPKKKRKV

SEQ ID NO: 357 - protein, 1824 aa, Artificial Sequence
  Synthetic
MKRTADGSEFESPKKKRKVSEASPASGPRHLMDPHIFTSNFNNGIGRHKTYLCYEVERLDNGTSVKMDQHRGFLHNQAKNLLCGFYGRHAELRFLDLVPSLQLDPAQIYRVTWFISWSPCFSWGCAGEVRAFLQENTHVRLRIFAARIYDYDPLYKEALQMLRDAGAQVSIMTYDEFKHCWDTFVDHQGCPFQPWDGLDEHSQALSGRLRAILQNQGNSGGSSGGSSGSETPGTSESATPESSGGSSGGSDKKYSIGLAIGTNSVGWAVITDEYKVPSKKFKVLGNTDRHSIKKNLIGALLFDSGETAEATRLKRTARRRYTRRKNRICYLQEIFSNEMAKVDDSFFHRLEESFLVEEDKKHERHPIFGNIVDEVAYHEKYPTIYHLRKKLVDSTDKADLRLIYLALAHMIKFRGHFLIEGDLNPDNSDVDKLFIQLVQTYNQLFEENPINASGVDAKAILSARLSKSRRLENLIAQLPGEKKNGLFGNLIALSLGLTPNFKSNFDLAEDAKLQLSKDTYDDDLDNLLAQIGDQYADLFLAAKNLSDAILLSDILRVNTEITKAPLSASMIKRYDEHHQDLTLLKALVRQQLPEKYKEIFFDQSKNGYAGYIDGGASQEEFYKFIKPILEKMDGTEELLVKLNREDLLRKQRTFDNGSIPHQIHLGELHAILRRQEDFYPFLKDNREKIEKILTFRIPYYVGPLARGNSRFAWMTRKSEETITPWNFEEVVDKGASAQSFIERMTNFDKNLPNEKVLPKHSLLYEYFTVYNELTKVKYVTEGMRKPAFLSGEQKKAIVDLLFKTNRKVTVKQLKEDYFKKIECFDSVEISGVEDRFNASLGTYHDLLKIIKDKDFLDNEENEDILEDIVLTLTLFEDREMIEERLKTYAHLFDDKVMKQLKRRRYTGWGRLSRKLINGIRDKQSGKTILDFLKSDGFANRNFMQLIHDDSLTFKEDIQKAQVSGQGDSLHEHIANLAGSPAIKKGILQTVKVVDELVKVMGRHKPENIVIEMARENQTTQKGQKNSRERMKRIEEGIKELGSQILKEHPVENTQLQNEKLYLYYLQNGRDMYVDQELDINRLSDYDVDHIVPQSFLKDDSIDNKVLTRSDKNRGKSDNVPSEEVVKKMKNYWRQLLNAKLITQRKFDNLTKAERGGLSELDKAGFIKRQLVETRQITKHVAQILDSRMNTKYDENDKLIREVKVITLKSKLVSDFRKDFQFYKVREINNYHHAHDAYLNAVVGTALIKKYPKLESEFVYGDYKVYDVRKMIAKSEQEIGKATAKYFFYSNIMNFFKTEITLANGEIRKRPLIETNGETGEIVWDKGRDFATVRKVLSMPQVNIVKKTEVQTGGFSKESILPKRNSDKLIARKKDWDPKKYGGFDSPTVAYSVLVVAKVEKGKSKKLKSVKELLGITIMERSSFEKNPIDFLEAKGYKEVKKDLIIKLPKYSLFELENGRKRMLASAGELQKGNELALPSKYVNFLYLASHYEKLKGSPEDNEQKQLFVEQHKHYLDEIIEQISEFSKRVILADANLDKVLSAYNKHRDKPIREQAENIIHLFTLTNLGAPAAFKYFDTTIDRKRYTSTKEVLDATLIHQSITGLYETRIDLSQLGGDSGGSGGSGGSTNLSDIIEKETGKQLVIQESILMLPEEVEEVIGNKPESDILVHTAYDESTDENVMLLTSDAPEYKPWALVIQDSNGENKIKMLSGGSGGSGGSTNLSDIIEKETGKQLVIQESILMLPEEVEEVIGNKPESDILVHTAYDESTDENVMLLTSDAPEYKPWALVIQDSNGENKIKMLSGGSKRTADGSEFEPKKKRKV

SEQ ID NO: 358 - protein, 2006 aa, Artificial Sequence
  Synthetic
MKRTADGSEFESPKKKRKVNPQIRNPMERMYRDTFYDNFENEPILYGRSYTWLCYEVKIKRGRSNLLWDTGVFRGQVYFKPQYHAEMCFLSWFCGNQLPAYKCFQITWFVSWTPCPDCVAKLAEFLSEHPNVTLTISAARLYYYWERDYRRALCRLSQAGARVTIMDYEEFAYCWENFVYNEGQQFMPWYKFDENYAFLHRTLKEILRYLMDPDTFTFNFNNDPLVLRRRQTYLCYEVERLDNGTWVLMDQHMGFLCNEAKNLLCGFYGRHAELRFLDLVPSLQLDPAQIYRVTWFISWSPCFSWGCAGEVRAFLQENTHVRLRIFAARIYDYDPLYKEALQMLRDAGAQVSIMTYDEFEYCWDTFVYRQGCPFQPWDGLEEHSQALSGRLRAILQNQGNSGGSSGGSSGSETPGTSESATPESSGGSSGGSDKKYSIGLAIGTNSVGWAVITDEYKVPSKKFKVLGNTDRHSIKKNLIGALLFDSGETAEATRLKRTARRRYTRRKNRICYLQEIFSNEMAKVDDSFFHRLEESFLVEEDKKHERHPIFGNIVDEVAYHEKYPTIYHLRKKLVDSTDKADLRLIYLALAHMIKFRGHFLIEGDLNPDNSDVDKLFIQLVQTYNQLFEENPINASGVDAKAILSARLSKSRRLENLIAQLPGEKKNGLFGNLIALSLGLTPNFKSNFDLAEDAKLQLSKDTYDDDLDNLLAQIGDQYADLFLAAKNLSDAILLSDILRVNTEITKAPLSASMIKRYDEHHQDLTLLKALVRQQLPEKYKEIFFDQSKNGYAGYIDGGASQEEFYKFIKPILEKMDGTEELLVKLNREDLLRKQRTFDNGSIPHQIHLGELHAILRRQEDFYPFLKDNREKIEKILTFRIPYYVGPLARGNSRFAWMTRKSEETITPWNFEEVVDKGASAQSFIERMTNFDKNLPNEKVLPKHSLLYEYFTVYNELTKVKYVTEGMRKPAFLSGEQKKAIVDLLFKTNRKVTVKQLKEDYFKKIECFDSVEISGVEDRFNASLGTYHDLLKIIKDKDFLDNEENEDILEDIVLTLTLFEDREMIEERLKTYAHLFDDKVMKQLKRRRYTGWGRLSRKLINGIRDKQSGKTILDFLKSDGFANRNFMQLIHDDSLTFKEDIQKAQVSGQGDSLHEHIANLAGSPAIKKGILQTVKVVDELVKVMGRHKPENIVIEMARENQTTQKGQKNSRERMKRIEEGIKELGSQILKEHPVENTQLQNEKLYLYYLQNGRDMYVDQELDINRLSDYDVDHIVPQSFLKDDSIDNKVLTRSDKNRGKSDNVPSEEVVKKMKNYWRQLLNAKLITQRKFDNLTKAERGGLSELDKAGFIKRQLVETRQITKHVAQILDSRMNTKYDENDKLIREVKVITLKSKLVSDFRKDFQFYKVREINNYHHAHDAYLNAVVGTALIKKYPKLESEFVYGDYKVYDVRKMIAKSEQEIGKATAKYFFYSNIMNFFKTEITLANGEIRKRPLIETNGETGEIVWDKGRDFATVRKVLSMPQVNIVKKTEVQTGGFSKESILPKRNSDKLIARKKDWDPKKYGGFDSPTVAYSVLVVAKVEKGKSKKLKSVKELLGITIMERSSFEKNPIDFLEAKGYKEVKKDLIIKLPKYSLFELENGRKRMLASAGELQKGNELALPSKYVNFLYLASHYEKLKGSPEDNEQKQLFVEQHKHYLDEIIEQISEFSKRVILADANLDKVLSAYNKHRDKPIREQAENIIHLFTLTNLGAPAAFKYFDTTIDRKRYTSTKEVLDATLIHQSITGLYETRIDLSQLGGDSGGSGGSGGSTNLSDIIEKETGKQLVIQESILMLPEEVEEVIGNKPESDILVHTAYDESTDENVMLLTSDAPEYKPWALVIQDSNGENKIKMLSGGSGGSGGSTNLSDIIEKETGKQLVIQESILMLPEEVEEVIGNKPESDILVHTAYDESTDENVMLLTSDAPEYKPWALVIQDSNGENKIKMLSGGSKRTADGSEFEPKKKRKV

SEQ ID NO: 359 - protein, 2008 aa, Artificial Sequence
  Synthetic
MKRTADGSEFESPKKKRKVKPHFRNTVERMYRDTFSYNFYNRPILSRRNTVWLCYEVKTKGPSRPPLDAKIFRGQVYSELKYHPEMRFFHWFSKWRKLHRDQEYEVTWYISWSPCTKCTRDMATFLAEDPKVTLTIFVARLYYFWDPDYQEALRSLCQKRDGPRATMKIMNYDEFQHCWSKFVYSQRELFEPWNNLPKYYILLHIMLGEILRHSMDPPTFTFNFNNEPWVRGRHETYLCYEVERMHNDTWVLLNQRRGFLCNQAPHKHGFLEGRHAELCFLDVIPFWKLDLDQDYRVTCFTSWSPCFSCAQEMAKFISKNKHVSLCIFTARIYDDQGRCQEGLRTLAEAGAKISIMTYSEFKHCWDTFVDHQGCPFQPWDGLDEHSQDLSGRLRAILQNQENSGGSSGGSSGSETPGTSESATPESSGGSSGGSDKKYSIGLAIGTNSVGWAVITDEYKVPSKKFKVLGNTDRHSIKKNLIGALLFDSGETAEATRLKRTARRRYTRRKNRICYLQEIFSNEMAKVDDSFFHRLEESFLVEEDKKHERHPIFGNIVDEVAYHEKYPTIYHLRKKLVDSTDKADLRLIYLALAHMIKFRGHFLIEGDLNPDNSDVDKLFIQLVQTYNQLFEENPINASGVDAKAILSARLSKSRRLENLIAQLPGEKKNGLFGNLIALSLGLTPNFKSNFDLAEDAKLQLSKDTYDDDLDNLLAQIGDQYADLFLAAKNLSDAILLSDILRVNTEITKAPLSASMIKRYDEHHQDLTLLKALVRQQLPEKYKEIFFDQSKNGYAGYIDGGASQEEFYKFIKPILEKMDGTEELLVKLNREDLLRKQRTFDNGSIPHQIHLGELHAILRRQEDFYPFLKDNREKIEKILTFRIPYYVGPLARGNSRFAWMTRKSEETITPWNFEEVVDKGASAQSFIERMTNFDKNLPNEKVLPKHSLLYEYFTVYNELTKVKYVTEGMRKPAFLSGEQKKAIVDLLFKTNRKVTVKQLKEDYFKKIECFDSVEISGVEDRFNASLGTYHDLLKIIKDKDFLDNEENEDILEDIVLTLTLFEDREMIEERLKTYAHLFDDKVMKQLKRRRYTGWGRLSRKLINGIRDKQSGKTILDFLKSDGFANRNFMQLIHDDSLTFKEDIQKAQVSGQGDSLHEHIANLAGSPAIKKGILQTVKVVDELVKVMGRHKPENIVIEMARENQTTQKGQKNSRERMKRIEEGIKELGSQILKEHPVENTQLQNEKLYLYYLQNGRDMYVDQELDINRLSDYDVDHIVPQSFLKDDSIDNKVLTRSDKNRGKSDNVPSEEVVKKMKNYWRQLLNAKLITQRKFDNLTKAERGGLSELDKAGFIKRQLVETRQITKHVAQILDSRMNTKYDENDKLIREVKVITLKSKLVSDFRKDFQFYKVREINNYHHAHDAYLNAVVGTALIKKYPKLESEFVYGDYKVYDVRKMIAKSEQEIGKATAKYFFYSNIMNFFKTEITLANGEIRKRPLIETNGETGEIVWDKGRDFATVRKVLSMPQVNIVKKTEVQTGGFSKESILPKRNSDKLIARKKDWDPKKYGGFDSPTVAYSVLVVAKVEKGKSKKLKSVKELLGITIMERSSFEKNPIDFLEAKGYKEVKKDLIIKLPKYSLFELENGRKRMLASAGELQKGNELALPSKYVNFLYLASHYEKLKGSPEDNEQKQLFVEQHKHYLDEIIEQISEFSKRVILADANLDKVLSAYNKHRDKPIREQAENIIHLFTLTNLGAPAAFKYFDTTIDRKRYTSTKEVLDATLIHQSITGLYETRIDLSQLGGDSGGSGGSGGSTNLSDIIEKETGKQLVIQESILMLPEEVEEVIGNKPESDILVHTAYDESTDENVMLLTSDAPEYKPWALVIQDSNGENKIKMLSGGSGGSGGSTNLSDIIEKETGKQLVIQESILMLPEEVEEVIGNKPESDILVHTAYDESTDENVMLLTSDAPEYKPWALVIQDSNGENKIKMLSGGSKRTADGSEFEPKKKRKV

SEQ ID NO: 360 - protein, 1822 aa, Artificial Sequence
  Synthetic
MKRTADGSEFESPKKKRKVDSLLMNRRKFLYQFKNVRWAKGRRETYLCYVVKRRDSATSFSLDFGYLRNKNGCHVELLFLRYISDWDLDPGRCYRVTWFTSWSPCYDCARHVADFLRGNPNLSLRIFTARLYFCEDRKAEPEGLRRLHRAGVQIAIMTFKDYFYCWNTFVENHERTFKAWEGLHENSVRLSRQLRRILLPLYEVDDLRDAFRTLGLSGGSSGGSSGSETPGTSESATPESSGGSSGGSDKKYSIGLAIGTNSVGWAVITDEYKVPSKKFKVLGNTDRHSIKKNLIGALLFDSGETAEATRLKRTARRRYTRRKNRICYLQEIFSNEMAKVDDSFFHRLEESFLVEEDKKHERHPIFGNIVDEVAYHEKYPTIYHLRKKLVDSTDKADLRLIYLALAHMIKFRGHFLIEGDLNPDNSDVDKLFIQLVQTYNQLFEENPINASGVDAKAILSARLSKSRRLENLIAQLPGEKKNGLFGNLIALSLGLTPNFKSNFDLAEDAKLQLSKDTYDDDLDNLLAQIGDQYADLFLAAKNLSDAILLSDILRVNTEITKAPLSASMIKRYDEHHQDLTLLKALVRQQLPEKYKEIFFDQSKNGYAGYIDGGASQEEFYKFIKPILEKMDGTEELLVKLNREDLLRKQRTFDNGSIPHQIHLGELHAILRRQEDFYPFLKDNREKIEKILTFRIPYYVGPLARGNSRFAWMTRKSEETITPWNFEEVVDKGASAQSFIERMTNFDKNLPNEKVLPKHSLLYEYFTVYNELTKVKYVTEGMRKPAFLSGEQKKAIVDLLFKTNRKVTVKQLKEDYFKKIECFDSVEISGVEDRFNASLGTYHDLLKIIKDKDFLDNEENEDILEDIVLTLTLFEDREMIEERLKTYAHLFDDKVMKQLKRRRYTGWGRLSRKLINGIRDKQSGKTILDFLKSDGFANRNFMQLIHDDSLTFKEDIQKAQVSGQGDSLHEHIANLAGSPAIKKGILQTVKVVDELVKVMGRHKPENIVIEMARENQTTQKGQKNSRERMKRIEEGIKELGSQILKEHPVENTQLQNEKLYLYYLQNGRDMYVDQELDINRLSDYDVDHIVPQSFLKDDSIDNKVLTRSDKNRGKSDNVPSEEVVKKMKNYWRQLLNAKLITQRKFDNLTKAERGGLSELDKAGFIKRQLVETRQITKHVAQILDSRMNTKYDENDKLIREVKVITLKSKLVSDFRKDFQFYKVREINNYHHAHDAYLNAVVGTALIKKYPKLESEFVYGDYKVYDVRKMIAKSEQEIGKATAKYFFYSNIMNFFKTEITLANGEIRKRPLIETNGETGEIVWDKGRDFATVRKVLSMPQVNIVKKTEVQTGGFSKESILPKRNSDKLIARKKDWDPKKYGGFDSPTVAYSVLVVAKVEKGKSKKLKSVKELLGITIMERSSFEKNPIDFLEAKGYKEVKKDLIIKLPKYSLFELENGRKRMLASAGELQKGNELALPSKYVNFLYLASHYEKLKGSPEDNEQKQLFVEQHKHYLDEIIEQISEFSKRVILADANLDKVLSAYNKHRDKPIREQAENIIHLFTLTNLGAPAAFKYFDTTIDRKRYTSTKEVLDATLIHQSITGLYETRIDLSQLGGDSGGSGGSGGSTNLSDIIEKETGKQLVIQESILMLPEEVEEVIGNKPESDILVHTAYDESTDENVMLLTSDAPEYKPWALVIQDSNGENKIKMLSGGSGGSGGSTNLSDIIEKETGKQLVIQESILMLPEEVEEVIGNKPESDILVHTAYDESTDENVMLLTSDAPEYKPWALVIQDSNGENKIKMLSGGSKRTADGSEFEPKKKRKV

SEQ ID NO: 361 - protein, 1832 aa, Artificial Sequence
  Synthetic
MKRTADGSEFESPKKKRKVTDAEYVRIHEKLDIYTFKKQFFNNKKSVSHRCYVLFELKRRGERRACFWGYAVNKPQSGTERGIHAEIFSIRKVEEYLRDNPGQFTINWYSSWSPCADCAEKILEWYNQELRGNGHTLKIWACKLYYEKNARNQIGLWNLRDNGVGLNVMVSEHYQCCRKIFIQSSHNQLNENRWLEKTLKRAEKRRSELSIMIQVKILHTTKSPAVSGGSSGGSSGSETPGTSESATPESSGGSSGGSDKKYSIGLAIGTNSVGWAVITDEYKVPSKKFKVLGNTDRHSIKKNLIGALLFDSGETAEATRLKRTARRRYTRRKNRICYLQEIFSNEMAKVDDSFFHRLEESFLVEEDKKHERHPIFGNIVDEVAYHEKYPTIYHLRKKLVDSTDKADLRLIYLALAHMIKFRGHFLIEGDLNPDNSDVDKLFIQLVQTYNQLFEENPINASGVDAKAILSARLSKSRRLENLIAQLPGEKKNGLFGNLIALSLGLTPNFKSNFDLAEDAKLQLSKDTYDDDLDNLLAQIGDQYADLFLAAKNLSDAILLSDILRVNTEITKAPLSASMIKRYDEHHQDLTLLKALVRQQLPEKYKEIFFDQSKNGYAGYIDGGASQEEFYKFIKPILEKMDGTEELLVKLNREDLLRKQRTFDNGSIPHQIHLGELHAILRRQEDFYPFLKDNREKIEKILTFRIPYYVGPLARGNSRFAWMTRKSEETITPWNFEEVVDKGASAQSFIERMTNFDKNLPNEKVLPKHSLLYEYFTVYNELTKVKYVTEGMRKPAFLSGEQKKAIVDLLFKTNRKVTVKQLKEDYFKKIECFDSVEISGVEDRFNASLGTYHDLLKIIKDKDFLDNEENEDILEDIVLTLTLFEDREMIEERLKTYAHLFDDKVMKQLKRRRYTGWGRLSRKLINGIRDKQSGKTILDFLKSDGFANRNFMQLIHDDSLTFKEDIQKAQVSGQGDSLHEHIANLAGSPAIKKGILQTVKVVDELVKVMGRHKPENIVIEMARENQTTQKGQKNSRERMKRIEEGIKELGSQILKEHPVENTQLQNEKLYLYYLQNGRDMYVDQELDINRLSDYDVDHIVPQSFLKDDSIDNKVLTRSDKNRGKSDNVPSEEVVKKMKNYWRQLLNAKLITQRKFDNLTKAERGGLSELDKAGFIKRQLVETRQITKHVAQILDSRMNTKYDENDKLIREVKVITLKSKLVSDFRKDFQFYKVREINNYHHAHDAYLNAVVGTALIKKYPKLESEFVYGDYKVYDVRKMIAKSEQEIGKATAKYFFYSNIMNFFKTEITLANGEIRKRPLIETNGETGEIVWDKGRDFATVRKVLSMPQVNIVKKTEVQTGGFSKESILPKRNSDKLIARKKDWDPKKYGGFDSPTVAYSVLVVAKVEKGKSKKLKSVKELLGITIMERSSFEKNPIDFLEAKGYKEVKKDLIIKLPKYSLFELENGRKRMLASAGELQKGNELALPSKYVNFLYLASHYEKLKGSPEDNEQKQLFVEQHKHYLDEIIEQISEFSKRVILADANLDKVLSAYNKHRDKPIREQAENIIHLFTLTNLGAPAAFKYFDTTIDRKRYTSTKEVLDATLIHQSITGLYETRIDLSQLGGDSGGSGGSGGSTNLSDIIEKETGKQLVIQESILMLPEEVEEVIGNKPESDILVHTAYDESTDENVMLLTSDAPEYKPWALVIQDSNGENKIKMLSGGSGGSGGSTNLSDIIEKETGKQLVIQESILMLPEEVEEVIGNKPESDILVHTAYDESTDENVMLLTSDAPEYKPWALVIQDSNGENKIKMLSGGSKRTADGSEFEPKKKRKV

SEQ ID NO: 362 - protein, 1786 aa, Artificial Sequence
  Synthetic
MKRTADGSEFESPKKKRKVFERNYDPRELRKETYLLYEIKWGKSGKLWRHWCQNNRTQHAEVYFLENIFNARRFNPSTHCSITWYLSWSPCAECSQKIVDFLKEHPNVNLEIYVARLYYHEDERNRQGLRDLVNSGVTIRIMDLPDYNYCWKTFVSDQGGDEDYWPGHFAPWIKQYSLKLSGGSSGGSSGSETPGTSESATPESSGGSSGGSDKKYSIGLAIGTNSVGWAVITDEYKVPSKKFKVLGNTDRHSIKKNLIGALLFDSGETAEATRLKRTARRRYTRRKNRICYLQEIFSNEMAKVDDSFFHRLEESFLVEEDKKHERHPIFGNIVDEVAYHEKYPTIYHLRKKLVDSTDKADLRLIYLALAHMIKFRGHFLIEGDLNPDNSDVDKLFIQLVQTYNQLFEENPINASGVDAKAILSARLSKSRRLENLIAQLPGEKKNGLFGNLIALSLGLTPNFKSNFDLAEDAKLQLSKDTYDDDLDNLLAQIGDQYADLFLAAKNLSDAILLSDILRVNTEITKAPLSASMIKRYDEHHQDLTLLKALVRQQLPEKYKEIFFDQSKNGYAGYIDGGASQEEFYKFIKPILEKMDGTEELLVKLNREDLLRKQRTFDNGSIPHQIHLGELHAILRRQEDFYPFLKDNREKIEKILTFRIPYYVGPLARGNSRFAWMTRKSEETITPWNFEEVVDKGASAQSFIERMTNFDKNLPNEKVLPKHSLLYEYFTVYNELTKVKYVTEGMRKPAFLSGEQKKAIVDLLFKTNRKVTVKQLKEDYFKKIECFDSVEISGVEDRFNASLGTYHDLLKIIKDKDFLDNEENEDILEDIVLTLTLFEDREMIEERLKTYAHLFDDKVMKQLKRRRYTGWGRLSRKLINGIRDKQSGKTILDFLKSDGFANRNFMQLIHDDSLTFKEDIQKAQVSGQGDSLHEHIANLAGSPAIKKGILQTVKVVDELVKVMGRHKPENIVIEMARENQTTQKGQKNSRERMKRIEEGIKELGSQILKEHPVENTQLQNEKLYLYYLQNGRDMYVDQELDINRLSDYDVDHIVPQSFLKDDSIDNKVLTRSDKNRGKSDNVPSEEVVKKMKNYWRQLLNAKLITQRKFDNLTKAERGGLSELDKAGFIKRQLVETRQITKHVAQILDSRMNTKYDENDKLIREVKVITLKSKLVSDFRKDFQFYKVREINNYHHAHDAYLNAVVGTALIKKYPKLESEFVYGDYKVYDVRKMIAKSEQEIGKATAKYFFYSNIMNFFKTEITLANGEIRKRPLIETNGETGEIVWDKGRDFATVRKVLSMPQVNIVKKTEVQTGGFSKESILPKRNSDKLIARKKDWDPKKYGGFDSPTVAYSVLVVAKVEKGKSKKLKSVKELLGITIMERSSFEKNPIDFLEAKGYKEVKKDLIIKLPKYSLFELENGRKRMLASAGELQKGNELALPSKYVNFLYLASHYEKLKGSPEDNEQKQLFVEQHKHYLDEIIEQISEFSKRVILADANLDKVLSAYNKHRDKPIREQAENIIHLFTLTNLGAPAAFKYFDTTIDRKRYTSTKEVLDATLIHQSITGLYETRIDLSQLGGDSGGSGGSGGSTNLSDIIEKETGKQLVIQESILMLPEEVEEVIGNKPESDILVHTAYDESTDENVMLLTSDAPEYKPWALVIQDSNGENKIKMLSGGSGGSGGSTNLSDIIEKETGKQLVIQESILMLPEEVEEVIGNKPESDILVHTAYDESTDENVMLLTSDAPEYKPWALVIQDSNGENKIKMLSGGSKRTADGSEFEPKKKRKV

SEQ ID NO: 363 - protein, 1823 aa, Artificial Sequence
  Synthetic
MKRTADGSEFESPKKKRKVEASPASGPRHLMDPHIFTSNFNNGIGRHKTYLCYEVERLDNGTSVKMDQHRGFLHGQAKNLLCGFYGRHAELRFLDLVPSLQLDPAQIYRVTWFISWSPCFSWGCAGEVRAFLQENTHVRLRIFAARIYDYDPLYKEALQMLRDAGAQVSIMTYDEFKHCWDTFVDHQGCPFQPWDGLDEHSQALSGRLRAILQNQGNSGGSSGGSSGSETPGTSESATPESSGGSSGGSDKKYSIGLAIGTNSVGWAVITDEYKVPSKKFKVLGNTDRHSIKKNLIGALLFDSGETAEATRLKRTARRRYTRRKNRICYLQEIFSNEMAKVDDSFFHRLEESFLVEEDKKHERHPIFGNIVDEVAYHEKYPTIYHLRKKLVDSTDKADLRLIYLALAHMIKFRGHFLIEGDLNPDNSDVDKLFIQLVQTYNQLFEENPINASGVDAKAILSARLSKSRRLENLIAQLPGEKKNGLFGNLIALSLGLTPNFKSNFDLAEDAKLQLSKDTYDDDLDNLLAQIGDQYADLFLAAKNLSDAILLSDILRVNTEITKAPLSASMIKRYDEHHQDLTLLKALVRQQLPEKYKEIFFDQSKNGYAGYIDGGASQEEFYKFIKPILEKMDGTEELLVKLNREDLLRKQRTFDNGSIPHQIHLGELHAILRRQEDFYPFLKDNREKIEKILTFRIPYYVGPLARGNSRFAWMTRKSEETITPWNFEEVVDKGASAQSFIERMTNFDKNLPNEKVLPKHSLLYEYFTVYNELTKVKYVTEGMRKPAFLSGEQKKAIVDLLFKTNRKVTVKQLKEDYFKKIECFDSVEISGVEDRFNASLGTYHDLLKIIKDKDFLDNEENEDILEDIVLTLTLFEDREMIEERLKTYAHLFDDKVMKQLKRRRYTGWGRLSRKLINGIRDKQSGKTILDFLKSDGFANRNFMQLIHDDSLTFKEDIQKAQVSGQGDSLHEHIANLAGSPAIKKGILQTVKVVDELVKVMGRHKPENIVIEMARENQTTQKGQKNSRERMKRIEEGIKELGSQILKEHPVENTQLQNEKLYLYYLQNGRDMYVDQELDINRLSDYDVDHIVPQSFLKDDSIDNKVLTRSDKNRGKSDNVPSEEVVKKMKNYWRQLLNAKLITQRKFDNLTKAERGGLSELDKAGFIKRQLVETRQITKHVAQILDSRMNTKYDENDKLIREVKVITLKSKLVSDFRKDFQFYKVREINNYHHAHDAYLNAVVGTALIKKYPKLESEFVYGDYKVYDVRKMIAKSEQEIGKATAKYFFYSNIMNFFKTEITLANGEIRKRPLIETNGETGEIVWDKGRDFATVRKVLSMPQVNIVKKTEVQTGGFSKESILPKRNSDKLIARKKDWDPKKYGGFDSPTVAYSVLVVAKVEKGKSKKLKSVKELLGITIMERSSFEKNPIDFLEAKGYKEVKKDLIIKLPKYSLFELENGRKRMLASAGELQKGNELALPSKYVNFLYLASHYEKLKGSPEDNEQKQLFVEQHKHYLDEIIEQISEFSKRVILADANLDKVLSAYNKHRDKPIREQAENIIHLFTLTNLGAPAAFKYFDTTIDRKRYTSTKEVLDATLIHQSITGLYETRIDLSQLGGDSGGSGGSGGSTNLSDIIEKETGKQLVIQESILMLPEEVEEVIGNKPESDILVHTAYDESTDENVMLLTSDAPEYKPWALVIQDSNGENKIKMLSGGSGGSGGSTNLSDIIEKETGKQLVIQESILMLPEEVEEVIGNKPESDILVHTAYDESTDENVMLLTSDAPEYKPWALVIQDSNGENKIKMLSGGSKRTADGSEFEPKKKRKV

SEQ ID NO: 364 - protein, 1853 aa, Artificial Sequence
  Synthetic
MKRTADGSEFESPKKKRKVSSETGPVAVDPTLRRRIEPHEFEVFFDPRELAAETCLLYEINWGGRHSIWRHTSQNTNKHVEVNFIEKFTTERYFCPNTRCSITWFLSWSPCGECSRAITEFLSRYPHVTLFIYIARLYHLANPRNRQGLRDLISSGVTIQIMTEQESGYCWRNFVNYSPSNEAHWPRYPHLWVRLYVLELYCIILGLPPCLNILRRKQPQLTFFTIALQSCHYQRLPPHILWATGLKSGGSSGGSSGSETPGTSESATPESSGGSSGGSDKKYSIGLAIGTNSVGWAVITDEYKVPSKKFKVLGNTDRHSIKKNLIGALLFDSGETAEATRLKRTARRRYTRRKNRICYLQEIFSNEMAKVDDSFFHRLEESFLVEEDKKHERHPIFGNIVDEVAYHEKYPTIYHLRKKLVDSTDKADLRLIYLALAHMIKFRGHFLIEGDLNPDNSDVDKLFIQLVQTYNQLFEENPINASGVDAKAILSARLSKSRRLENLIAQLPGEKKNGLFGNLIALSLGLTPNFKSNFDLAEDAKLQLSKDTYDDDLDNLLAQIGDQYADLFLAAKNLSDAILLSDILRVNTEITKAPLSASMIKRYDEHHQDLTLLKALVRQQLPEKYKEIFFDQSKNGYAGYIDGGASQEEFYKFIKPILEKMDGTEELLVKLNREDLLRKQRTFDNGSIPHQIHLGELHAILRRQEDFYPFLKDNREKIEKILTFRIPYYVGPLARGNSRFAWMTRKSEETITPWNFEEVVDKGASAQSFIERMTNFDKNLPNEKVLPKHSLLYEYFTVYNELTKVKYVTEGMRKPAFLSGEQKKAIVDLLFKTNRKVTVKQLKEDYFKKIECFDSVEISGVEDRFNASLGTYHDLLKIIKDKDFLDNEENEDILEDIVLTLTLFEDREMIEERLKTYAHLFDDKVMKQLKRRRYTGWGRLSRKLINGIRDKQSGKTILDFLKSDGFANRNFMQLIHDDSLTFKEDIQKAQVSGQGDSLHEHIANLAGSPAIKKGILQTVKVVDELVKVMGRHKPENIVIEMARENQTTQKGQKNSRERMKRIEEGIKELGSQILKEHPVENTQLQNEKLYLYYLQNGRDMYVDQELDINRLSDYDVDHIVPQSFLKDDSIDNKVLTRSDKNRGKSDNVPSEEVVKKMKNYWRQLLNAKLITQRKFDNLTKAERGGLSELDKAGFIKRQLVETRQITKHVAQILDSRMNTKYDENDKLIREVKVITLKSKLVSDFRKDFQFYKVREINNYHHAHDAYLNAVVGTALIKKYPKLESEFVYGDYKVYDVRKMIAKSEQEIGKATAKYFFYSNIMNFFKTEITLANGEIRKRPLIETNGETGEIVWDKGRDFATVRKVLSMPQVNIVKKTEVQTGGFSKESILPKRNSDKLIARKKDWDPKKYGGFDSPTVAYSVLVVAKVEKGKSKKLKSVKELLGITIMERSSFEKNPIDFLEAKGYKEVKKDLIIKLPKYSLFELENGRKRMLASAGELQKGNELALPSKYVNFLYLASHYEKLKGSPEDNEQKQLFVEQHKHYLDEIIEQISEFSKRVILADANLDKVLSAYNKHRDKPIREQAENIIHLFTLTNLGAPAAFKYFDTTIDRKRYTSTKEVLDATLIHQSITGLYETRIDLSQLGGDSGGSGGSGGSTNLSDIIEKETGKQLVIQESILMLPEEVEEVIGNKPESDILVHTAYDESTDENVMLLTSDAPEYKPWALVIQDSNGENKIKMLSGGSGGSGGSTNLSDIIEKETGKQLVIQESILMLPEEVEEVIGNKPESDILVHTAYDESTDENVMLLTSDAPEYKPWALVIQDSNGENKIKMLSGGSKRTADGSEFEPKKKRKV

SEQ ID NO: 365 - protein, 1853 aa, Artificial Sequence
  Synthetic
MKRTADGSEFESPKKKRKVSSETGPVAVDPTLRRRIEPHEFEVFFDPRELRKETCLLYEINWGGRHSIWRHTSQNTNKHVEVNFIEKFTTERYFCPNTRCSITWFLSWSPCGECSRAITEFLSRYPHVTLFIYIARLYHHADPRNRQGLRDLISSGVTIQIMTEQESGYCWRNFVNYSPSNEAHWPRYPHLWVRLYVLELYCIILGLPPCLNILRRKQPQLTFFTIALQSCHYQRLPPHILWATGLKSGGSSGGSSGSETPGTSESATPESSGGSSGGSDKKYSIGLAIGTNSVGWAVITDEYKVPSKKFKVLGNTDRHSIKKNLIGALLFDSGETAEATRLKRTARRRYTRRKNRICYLQEIFSNEMAKVDDSFFHRLEESFLVEEDKKHERHPIFGNIVDEVAYHEKYPTIYHLRKKLVDSTDKADLRLIYLALAHMIKFRGHFLIEGDLNPDNSDVDKLFIQLVQTYNQLFEENPINASGVDAKAILSARLSKSRRLENLIAQLPGEKKNGLFGNLIALSLGLTPNFKSNFDLAEDAKLQLSKDTYDDDLDNLLAQIGDQYADLFLAAKNLSDAILLSDILRVNTEITKAPLSASMIKRYDEHHQDLTLLKALVRQQLPEKYKEIFFDQSKNGYAGYIDGGASQEEFYKFIKPILEKMDGTEELLVKLNREDLLRKQRTFDNGSIPHQIHLGELHAILRRQEDFYPFLKDNREKIEKILTFRIPYYVGPLARGNSRFAWMTRKSEETITPWNFEEVVDKGASAQSFIERMTNFDKNLPNEKVLPKHSLLYEYFTVYNELTKVKYVTEGMRKPAFLSGEQKKAIVDLLFKTNRKVTVKQLKEDYFKKIECFDSVEISGVEDRFNASLGTYHDLLKIIKDKDFLDNEENEDILEDIVLTLTLFEDREMIEERLKTYAHLFDDKVMKQLKRRRYTGWGRLSRKLINGIRDKQSGKTILDFLKSDGFANRNFMQLIHDDSLTFKEDIQKAQVSGQGDSLHEHIANLAGSPAIKKGILQTVKVVDELVKVMGRHKPENIVIEMARENQTTQKGQKNSRERMKRIEEGIKELGSQILKEHPVENTQLQNEKLYLYYLQNGRDMYVDQELDINRLSDYDVDHIVPQSFLKDDSIDNKVLTRSDKNRGKSDNVPSEEVVKKMKNYWRQLLNAKLITQRKFDNLTKAERGGLSELDKAGFIKRQLVETRQITKHVAQILDSRMNTKYDENDKLIREVKVITLKSKLVSDFRKDFQFYKVREINNYHHAHDAYLNAVVGTALIKKYPKLESEFVYGDYKVYDVRKMIAKSEQEIGKATAKYFFYSNIMNFFKTEITLANGEIRKRPLIETNGETGEIVWDKGRDFATVRKVLSMPQVNIVKKTEVQTGGFSKESIRPKRNSDKLIARKKDWDPKKYGGFVSPTVAYSVLVVAKVEKGKSKKLKSVKELLGITIMERSSFEKNPIDFLEAKGYKEVKKDLIIKLPKYSLFELENGRKRMLASARFLQKGNELALPSKYVNFLYLASHYEKLKGSPEDNEQKQLFVEQHKHYLDEIIEQISEFSKRVILADANLDKVLSAYNKHRDKPIREQAENIIHLFTLTNLGAPRAFKYFDTTIDRKVYRSTKEVLDATLIHQSITGLYETRIDLSQLGGDSGGSGGSGGSTNLSDIIEKETGKQLVIQESILMLPEEVEEVIGNKPESDILVHTAYDESTDENVMLLTSDAPEYKPWALVIQDSNGENKIKMLSGGSGGSGGSTNLSDIIEKETGKQLVIQESILMLPEEVEEVIGNKPESDILVHTAYDESTDENVMLLTSDAPEYKPWALVIQDSNGENKIKMLSGGSKRTADGSEFEPKKKRKV

SEQ ID NO: 366 - protein, 1853 aa, Artificial Sequence
  Synthetic
MKRTADGSEFESPKKKRKVSSETGPVAVDPTLRRRIEPHEFEVFFDPRELRKETCLLYEINWGGRHSIWRHTSQNTNKHVEVNFIEKFTTERYFCPNTRCSITWFLSYSPCGECSRAITEFLSRYPHVTLFIYIARLYHHADPENRQGLRDLISSGVTIQIMTEQESGYCWRNFVNYSPSNEAHWPRYPHLWVRLYVLELYCIILGLPPCLNILRRKQPQLTFFTIALQSCHYQRLPPHILWATGLKSGGSSGGSSGSETPGTSESATPESSGGSSGGSDKKYSIGLAIGTNSVGWAVITDEYKVPSKKFKVLGNTDRHSIKKNLIGALLFDSGETAEATRLKRTARRRYTRRKNRICYLQEIFSNEMAKVDDSFFHRLEESFLVEEDKKHERHPIFGNIVDEVAYHEKYPTIYHLRKKLVDSTDKADLRLIYLALAHMIKFRGHFLIEGDLNPDNSDVDKLFIQLVQTYNQLFEENPINASGVDAKAILSARLSKSRRLENLIAQLPGEKKNGLFGNLIALSLGLTPNFKSNFDLAEDAKLQLSKDTYDDDLDNLLAQIGDQYADLFLAAKNLSDAILLSDILRVNTEITKAPLSASMIKRYDEHHQDLTLLKALVRQQLPEKYKEIFFDQSKNGYAGYIDGGASQEEFYKFIKPILEKMDGTEELLVKLNREDLLRKQRTFDNGSIPHQIHLGELHAILRRQEDFYPFLKDNREKIEKILTFRIPYYVGPLARGNSRFAWMTRKSEETITPWNFEEVVDKGASAQSFIERMTNFDKNLPNEKVLPKHSLLYEYFTVYNELTKVKYVTEGMRKPAFLSGEQKKAIVDLLFKTNRKVTVKQLKEDYFKKIECFDSVEISGVEDRFNASLGTYHDLLKIIKDKDFLDNEENEDILEDIVLTLTLFEDREMIEERLKTYAHLFDDKVMKQLKRRRYTGWGRLSRKLINGIRDKQSGKTILDFLKSDGFANRNFMQLIHDDSLTFKEDIQKAQVSGQGDSLHEHIANLAGSPAIKKGILQTVKVVDELVKVMGRHKPENIVIEMARENQTTQKGQKNSRERMKRIEEGIKELGSQILKEHPVENTQLQNEKLYLYYLQNGRDMYVDQELDINRLSDYDVDHIVPQSFLKDDSIDNKVLTRSDKNRGKSDNVPSEEVVKKMKNYWRQLLNAKLITQRKFDNLTKAERGGLSELDKAGFIKRQLVETRQITKHVAQILDSRMNTKYDENDKLIREVKVITLKSKLVSDFRKDFQFYKVREINNYHHAHDAYLNAVVGTALIKKYPKLESEFVYGDYKVYDVRKMIAKSEQEIGKATAKYFFYSNIMNFFKTEITLANGEIRKRPLIETNGETGEIVWDKGRDFATVRKVLSMPQVNIVKKTEVQTGGFSKESIRPKRNSDKLIARKKDWDPKKYGGFVSPTVAYSVLVVAKVEKGKSKKLKSVKELLGITIMERSSFEKNPIDFLEAKGYKEVKKDLIIKLPKYSLFELENGRKRMLASARFLQKGNELALPSKYVNFLYLASHYEKLKGSPEDNEQKQLFVEQHKHYLDEIIEQISEFSKRVILADANLDKVLSAYNKHRDKPIREQAENIIHLFTLTNLGAPRAFKYFDTTIDRKVYRSTKEVLDATLIHQSITGLYETRIDLSQLGGDSGGSGGSGGSTNLSDIIEKETGKQLVIQESILMLPEEVEEVIGNKPESDILVHTAYDESTDENVMLLTSDAPEYKPWALVIQDSNGENKIKMLSGGSGGSGGSTNLSDIIEKETGKQLVIQESILMLPEEVEEVIGNKPESDILVHTAYDESTDENVMLLTSDAPEYKPWALVIQDSNGENKIKMLSGGSKRTADGSEFEPKKKRKV

SEQ ID NO: 367 - protein, 1853 aa, Artificial Sequence
  Synthetic
MKRTADGSEFESPKKKRKVSSETGPVAVDPTLRRRIEPHEFEVFFDPRELRKETCLLYEINWGGRHSIWRHTSQNTNKHVEVNFIEKFTTERYFCPNTRCSITWFLSYSPCGECSRAITEFLSRYPHVTLFIYIARLYHHADPRNRQGLEDLISSGVTIQIMTEQESGYCWRNFVNYSPSNEAHWPRYPHLWVRLYVLELYCIILGLPPCLNILRRKQPQLTFFTIALQSCHYQRLPPHILWATGLKSGGSSGGSSGSETPGTSESATPESSGGSSGGSDKKYSIGLAIGTNSVGWAVITDEYKVPSKKFKVLGNTDRHSIKKNLIGALLFDSGETAEATRLKRTARRRYTRRKNRICYLQEIFSNEMAKVDDSFFHRLEESFLVEEDKKHERHPIFGNIVDEVAYHEKYPTIYHLRKKLVDSTDKADLRLIYLALAHMIKFRGHFLIEGDLNPDNSDVDKLFIQLVQTYNQLFEENPINASGVDAKAILSARLSKSRRLENLIAQLPGEKKNGLFGNLIALSLGLTPNFKSNFDLAEDAKLQLSKDTYDDDLDNLLAQIGDQYADLFLAAKNLSDAILLSDILRVNTEITKAPLSASMIKRYDEHHQDLTLLKALVRQQLPEKYKEIFFDQSKNGYAGYIDGGASQEEFYKFIKPILEKMDGTEELLVKLNREDLLRKQRTFDNGSIPHQIHLGELHAILRRQEDFYPFLKDNREKIEKILTFRIPYYVGPLARGNSRFAWMTRKSEETITPWNFEEVVDKGASAQSFIERMTNFDKNLPNEKVLPKHSLLYEYFTVYNELTKVKYVTEGMRKPAFLSGEQKKAIVDLLFKTNRKVTVKQLKEDYFKKIECFDSVEISGVEDRFNASLGTYHDLLKIIKDKDFLDNEENEDILEDIVLTLTLFEDREMIEERLKTYAHLFDDKVMKQLKRRRYTGWGRLSRKLINGIRDKQSGKTILDFLKSDGFANRNFMQLIHDDSLTFKEDIQKAQVSGQGDSLHEHIANLAGSPAIKKGILQTVKVVDELVKVMGRHKPENIVIEMARENQTTQKGQKNSRERMKRIEEGIKELGSQILKEHPVENTQLQNEKLYLYYLQNGRDMYVDQELDINRLSDYDVDHIVPQSFLKDDSIDNKVLTRSDKNRGKSDNVPSEEVVKKMKNYWRQLLNAKLITQRKFDNLTKAERGGLSELDKAGFIKRQLVETRQITKHVAQILDSRMNTKYDENDKLIREVKVITLKSKLVSDFRKDFQFYKVREINNYHHAHDAYLNAVVGTALIKKYPKLESEFVYGDYKVYDVRKMIAKSEQEIGKATAKYFFYSNIMNFFKTEITLANGEIRKRPLIETNGETGEIVWDKGRDFATVRKVLSMPQVNIVKKTEVQTGGFSKESIRPKRNSDKLIARKKDWDPKKYGGFVSPTVAYSVLVVAKVEKGKSKKLKSVKELLGITIMERSSFEKNPIDFLEAKGYKEVKKDLIIKLPKYSLFELENGRKRMLASARFLQKGNELALPSKYVNFLYLASHYEKLKGSPEDNEQKQLFVEQHKHYLDEIIEQISEFSKRVILADANLDKVLSAYNKHRDKPIREQAENIIHLFTLTNLGAPRAFKYFDTTIDRKVYRSTKEVLDATLIHQSITGLYETRIDLSQLGGDSGGSGGSGGSTNLSDIIEKETGKQLVIQESILMLPEEVEEVIGNKPESDILVHTAYDESTDENVMLLTSDAPEYKPWALVIQDSNGENKIKMLSGGSGGSGGSTNLSDIIEKETGKQLVIQESILMLPEEVEEVIGNKPESDILVHTAYDESTDENVMLLTSDAPEYKPWALVIQDSNGENKIKMLSGGSKRTADGSEFEPKKKRKV

SEQ ID NO: 368 - protein, 1853 aa, Artificial Sequence
  Synthetic
MKRTADGSEFESPKKKRKVSSETGPVAVDPTLRRRIEPHEFEVFFDPRELRKETCLLYEINWGGRHSIWRHTSQNTNKHVEVNFIEKFTTERYFCPNTRCSITWFLSYSPCGECSRAITEFLSRYPHVTLFIYIARLYHHADPENRQGLEDLISSGVTIQIMTEQESGYCWRNFVNYSPSNEAHWPRYPHLWVRLYVLELYCIILGLPPCLNILRRKQPQLTFFTIALQSCHYQRLPPHILWATGLKSGGSSGGSSGSETPGTSESATPESSGGSSGGSDKKYSIGLAIGTNSVGWAVITDEYKVPSKKFKVLGNTDRHSIKKNLIGALLFDSGETAEATRLKRTARRRYTRRKNRICYLQEIFSNEMAKVDDSFFHRLEESFLVEEDKKHERHPIFGNIVDEVAYHEKYPTIYHLRKKLVDSTDKADLRLIYLALAHMIKFRGHFLIEGDLNPDNSDVDKLFIQLVQTYNQLFEENPINASGVDAKAILSARLSKSRRLENLIAQLPGEKKNGLFGNLIALSLGLTPNFKSNFDLAEDAKLQLSKDTYDDDLDNLLAQIGDQYADLFLAAKNLSDAILLSDILRVNTEITKAPLSASMIKRYDEHHQDLTLLKALVRQQLPEKYKEIFFDQSKNGYAGYIDGGASQEEFYKFIKPILEKMDGTEELLVKLNREDLLRKQRTFDNGSIPHQIHLGELHAILRRQEDFYPFLKDNREKIEKILTFRIPYYVGPLARGNSRFAWMTRKSEETITPWNFEEVVDKGASAQSFIERMTNFDKNLPNEKVLPKHSLLYEYFTVYNELTKVKYVTEGMRKPAFLSGEQKKAIVDLLFKTNRKVTVKQLKEDYFKKIECFDSVEISGVEDRFNASLGTYHDLLKIIKDKDFLDNEENEDILEDIVLTLTLFEDREMIEERLKTYAHLFDDKVMKQLKRRRYTGWGRLSRKLINGIRDKQSGKTILDFLKSDGFANRNFMQLIHDDSLTFKEDIQKAQVSGQGDSLHEHIANLAGSPAIKKGILQTVKVVDELVKVMGRHKPENIVIEMARENQTTQKGQKNSRERMKRIEEGIKELGSQILKEHPVENTQLQNEKLYLYYLQNGRDMYVDQELDINRLSDYDVDHIVPQSFLKDDSIDNKVLTRSDKNRGKSDNVPSEEVVKKMKNYWRQLLNAKLITQRKFDNLTKAERGGLSELDKAGFIKRQLVETRQITKHVAQILDSRMNTKYDENDKLIREVKVITLKSKLVSDFRKDFQFYKVREINNYHHAHDAYLNAVVGTALIKKYPKLESEFVYGDYKVYDVRKMIAKSEQEIGKATAKYFFYSNIMNFFKTEITLANGEIRKRPLIETNGETGEIVWDKGRDFATVRKVLSMPQVNIVKKTEVQTGGFSKESIRPKRNSDKLIARKKDWDPKKYGGFVSPTVAYSVLVVAKVEKGKSKKLKSVKELLGITIMERSSFEKNPIDFLEAKGYKEVKKDLIIKLPKYSLFELENGRKRMLASARFLQKGNELALPSKYVNFLYLASHYEKLKGSPEDNEQKQLFVEQHKHYLDEIIEQISEFSKRVILADANLDKVLSAYNKHRDKPIREQAENIIHLFTLTNLGAPRAFKYFDTTIDRKVYRSTKEVLDATLIHQSITGLYETRIDLSQLGGDSGGSGGSGGSTNLSDIIEKETGKQLVIQESILMLPEEVEEVIGNKPESDILVHTAYDESTDENVMLLTSDAPEYKPWALVIQDSNGENKIKMLSGGSGGSGGSTNLSDIIEKETGKQLVIQESILMLPEEVEEVIGNKPESDILVHTAYDESTDENVMLLTSDAPEYKPWALVIQDSNGENKIKMLSGGSKRTADGSEFEPKKKRKV

SEQ ID NO: 369 - protein, 1853 aa, Artificial Sequence
  Synthetic
MKRTADGSEFESPKKKRKVSSETGPVAVDPTLRRRIEPHEFEVFFDPRELRKETCLLYEINWGGRHSIWRHTSQNTNKHVEVNFIEKFTTERYFCPNTRCSITWFLSWSPCGECSRAITEFLSRYPHVTLFIYIARLYHHADPENRQGLEDLISSGVTIQIMTEQESGYCWRNFVNYSPSNEAHWPRYPHLWVRLYVLELYCIILGLPPCLNILRRKQPQLTFFTIALQSCHYQRLPPHILWATGLKSGGSSGGSSGSETPGTSESATPESSGGSSGGSDKKYSIGLAIGTNSVGWAVITDEYKVPSKKFKVLGNTDRHSIKKNLIGALLFDSGETAEATRLKRTARRRYTRRKNRICYLQEIFSNEMAKVDDSFFHRLEESFLVEEDKKHERHPIFGNIVDEVAYHEKYPTIYHLRKKLVDSTDKADLRLIYLALAHMIKFRGHFLIEGDLNPDNSDVDKLFIQLVQTYNQLFEENPINASGVDAKAILSARLSKSRRLENLIAQLPGEKKNGLFGNLIALSLGLTPNFKSNFDLAEDAKLQLSKDTYDDDLDNLLAQIGDQYADLFLAAKNLSDAILLSDILRVNTEITKAPLSASMIKRYDEHHQDLTLLKALVRQQLPEKYKEIFFDQSKNGYAGYIDGGASQEEFYKFIKPILEKMDGTEELLVKLNREDLLRKQRTFDNGSIPHQIHLGELHAILRRQEDFYPFLKDNREKIEKILTFRIPYYVGPLARGNSRFAWMTRKSEETITPWNFEEVVDKGASAQSFIERMTNFDKNLPNEKVLPKHSLLYEYFTVYNELTKVKYVTEGMRKPAFLSGEQKKAIVDLLFKTNRKVTVKQLKEDYFKKIECFDSVEISGVEDRFNASLGTYHDLLKIIKDKDFLDNEENEDILEDIVLTLTLFEDREMIEERLKTYAHLFDDKVMKQLKRRRYTGWGRLSRKLINGIRDKQSGKTILDFLKSDGFANRNFMQLIHDDSLTFKEDIQKAQVSGQGDSLHEHIANLAGSPAIKKGILQTVKVVDELVKVMGRHKPENIVIEMARENQTTQKGQKNSRERMKRIEEGIKELGSQILKEHPVENTQLQNEKLYLYYLQNGRDMYVDQELDINRLSDYDVDHIVPQSFLKDDSIDNKVLTRSDKNRGKSDNVPSEEVVKKMKNYWRQLLNAKLITQRKFDNLTKAERGGLSELDKAGFIKRQLVETRQITKHVAQILDSRMNTKYDENDKLIREVKVITLKSKLVSDFRKDFQFYKVREINNYHHAHDAYLNAVVGTALIKKYPKLESEFVYGDYKVYDVRKMIAKSEQEIGKATAKYFFYSNIMNFFKTEITLANGEIRKRPLIETNGETGEIVWDKGRDFATVRKVLSMPQVNIVKKTEVQTGGFSKESIRPKRNSDKLIARKKDWDPKKYGGFVSPTVAYSVLVVAKVEKGKSKKLKSVKELLGITIMERSSFEKNPIDFLEAKGYKEVKKDLIIKLPKYSLFELENGRKRMLASARFLQKGNELALPSKYVNFLYLASHYEKLKGSPEDNEQKQLFVEQHKHYLDEIIEQISEFSKRVILADANLDKVLSAYNKHRDKPIREQAENIIHLFTLTNLGAPRAFKYFDTTIDRKVYRSTKEVLDATLIHQSITGLYETRIDLSQLGGDSGGSGGSGGSTNLSDIIEKETGKQLVIQESILMLPEEVEEVIGNKPESDILVHTAYDESTDENVMLLTSDAPEYKPWALVIQDSNGENKIKMLSGGSGGSGGSTNLSDIIEKETGKQLVIQESILMLPEEVEEVIGNKPESDILVHTAYDESTDENVMLLTSDAPEYKPWALVIQDSNGENKIKMLSGGSKRTADGSEFEPKKKRKV

SEQ ID NO: 370 - protein, 1853 aa, Artificial Sequence
  Synthetic
MKRTADGSEFESPKKKRKVSSETGPVAVDPTLRRRIEPHEFEVFFDPRELAAETCLLYEINWGGRHSIWRHTSQNTNKHVEVNFIEKFTTERYFCPNTRCSITWFLSWSPCGECSRAITEFLSRYPHVTLFIYIARLYHHADPRNRQGLRDLISSGVTIQIMTEQESGYCWRNFVNYSPSNEAHWPRYPHLWVRLYVLELYCIILGLPPCLNILRRKQPQLTFFTIALQSCHYQRLPPHILWATGLKSGGSSGGSSGSETPGTSESATPESSGGSSGGSDKKYSIGLAIGTNSVGWAVITDEYKVPSKKFKVLGNTDRHSIKKNLIGALLFDSGETAEATRLKRTARRRYTRRKNRICYLQEIFSNEMAKVDDSFFHRLEESFLVEEDKKHERHPIFGNIVDEVAYHEKYPTIYHLRKKLVDSTDKADLRLIYLALAHMIKFRGHFLIEGDLNPDNSDVDKLFIQLVQTYNQLFEENPINASGVDAKAILSARLSKSRRLENLIAQLPGEKKNGLFGNLIALSLGLTPNFKSNFDLAEDAKLQLSKDTYDDDLDNLLAQIGDQYADLFLAAKNLSDAILLSDILRVNTEITKAPLSASMIKRYDEHHQDLTLLKALVRQQLPEKYKEIFFDQSKNGYAGYIDGGASQEEFYKFIKPILEKMDGTEELLVKLNREDLLRKQRTFDNGSIPHQIHLGELHAILRRQEDFYPFLKDNREKIEKILTFRIPYYVGPLARGNSRFAWMTRKSEETITPWNFEEVVDKGASAQSFIERMTNFDKNLPNEKVLPKHSLLYEYFTVYNELTKVKYVTEGMRKPAFLSGEQKKAIVDLLFKTNRKVTVKQLKEDYFKKIECFDSVEISGVEDRFNASLGTYHDLLKIIKDKDFLDNEENEDILEDIVLTLTLFEDREMIEERLKTYAHLFDDKVMKQLKRRRYTGWGRLSRKLINGIRDKQSGKTILDFLKSDGFANRNFMQLIHDDSLTFKEDIQKAQVSGQGDSLHEHIANLAGSPAIKKGILQTVKVVDELVKVMGRHKPENIVIEMARENQTTQKGQKNSRERMKRIEEGIKELGSQILKEHPVENTQLQNEKLYLYYLQNGRDMYVDQELDINRLSDYDVDHIVPQSFLKDDSIDNKVLTRSDKNRGKSDNVPSEEVVKKMKNYWRQLLNAKLITQRKFDNLTKAERGGLSELDKAGFIKRQLVETRQITKHVAQILDSRMNTKYDENDKLIREVKVITLKSKLVSDFRKDFQFYKVREINNYHHAHDAYLNAVVGTALIKKYPKLESEFVYGDYKVYDVRKMIAKSEQEIGKATAKYFFYSNIMNFFKTEITLANGEIRKRPLIETNGETGEIVWDKGRDFATVRKVLSMPQVNIVKKTEVQTGGFSKESIRPKRNSDKLIARKKDWDPKKYGGFVSPTVAYSVLVVAKVEKGKSKKLKSVKELLGITIMERSSFEKNPIDFLEAKGYKEVKKDLIIKLPKYSLFELENGRKRMLASARFLQKGNELALPSKYVNFLYLASHYEKLKGSPEDNEQKQLFVEQHKHYLDEIIEQISEFSKRVILADANLDKVLSAYNKHRDKPIREQAENIIHLFTLTNLGAPRAFKYFDTTIDRKVYRSTKEVLDATLIHQSITGLYETRIDLSQLGGDSGGSGGSGGSTNLSDIIEKETGKQLVIQESILMLPEEVEEVIGNKPESDILVHTAYDESTDENVMLLTSDAPEYKPWALVIQDSNGENKIKMLSGGSGGSGGSTNLSDIIEKETGKQLVIQESILMLPEEVEEVIGNKPESDILVHTAYDESTDENVMLLTSDAPEYKPWALVIQDSNGENKIKMLSGGSKRTADGSEFEPKKKRKV

SEQ ID NO: 371 - protein, 1874 aa, Artificial Sequence
  Synthetic
MKRTADGSEFESPKKKRKVSSETGPVAVDPTLRRRIEPHEFEVFFDPRELRKETCLLYEINWGGRHSIWRHTSQNTNKHVEVNFIEKFTTERYFCPNTRCSITWFLSYSPCGECSRAITEFLSRYPHVTLFIYIARLYHHADPENRQGLRDLISSGVTIQIMTEQESGYCWRNFVNYSPSNEAHWPRYPHLWVRLYVLELYCIILGLPPCLNILRRKQPQLTFFTIALQSCHYQRLPPHILWATGLKSGGSSGGSSGSETPGTSESATPESSGGSSGGSEIGKATAKYFFYSNIMNFFKTEITLANGEIRKRPLIETNGETGEIVWDKGRDFATVRKVLSMPQVNIVKKTEVQTGGFSKESILPKRNSDKLIARKKDWDPKKYGGFDSPTVAYSVLVVAKVEKGKSKKLKSVKELLGITIMERSSFEKNPIDFLEAKGYKEVKKDLIIKLPKYSLFELENGRKRMLASAGELQKGNELALPSKYVNFLYLASHYEKLKGSPEDNEQKQLFVEQHKHYLDEIIEQISEFSKRVILADANLDKVLSAYNKHRDKPIREQAENIIHLFTLTNLGAPAAFKYFDTTIDRKRYTSTKEVLDATLIHQSITGLYETRIDLSQLGGDGGSGGSGGSGGSGGSGGSGGMDKKYSIGLAIGTNSVGWAVITDEYKVPSKKFKVLGNTDRHSIKKNLIGALLFDSGETAEATRLKRTARRRYTRRKNRICYLQEIFSNEMAKVDDSFFHRLEESFLVEEDKKHERHPIFGNIVDEVAYHEKYPTIYHLRKKLVDSTDKADLRLIYLALAHMIKFRGHFLIEGDLNPDNSDVDKLFIQLVQTYNQLFEENPINASGVDAKAILSARLSKSRRLENLIAQLPGEKKNGLFGNLIALSLGLTPNFKSNFDLAEDAKLQLSKDTYDDDLDNLLAQIGDQYADLFLAAKNLSDAILLSDILRVNTEITKAPLSASMIKRYDEHHQDLTLLKALVRQQLPEKYKEIFFDQSKNGYAGYIDGGASQEEFYKFIKPILEKMDGTEELLVKLNREDLLRKQRTFDNGSIPHQIHLGELHAILRRQEDFYPFLKDNREKIEKILTFRIPYYVGPLARGNSRFAWMTRKSEETITPWNFEEVVDKGASAQSFIERMTNFDKNLPNEKVLPKHSLLYEYFTVYNELTKVKYVTEGMRKPAFLSGEQKKAIVDLLFKTNRKVTVKQLKEDYFKKIECFDSVEISGVEDRFNASLGTYHDLLKIIKDKDFLDNEENEDILEDIVLTLTLFEDREMIEERLKTYAHLFDDKVMKQLKRRRYTGWGRLSRKLINGIRDKQSGKTILDFLKSDGFANRNFMQLIHDDSLTFKEDIQKAQVSGQGDSLHEHIANLAGSPAIKKGILQTVKVVDELVKVMGRHKPENIVIEMARENQTTQKGQKNSRERMKRIEEGIKELGSQILKEHPVENTQLQNEKLYLYYLQNGRDMYVDQELDINRLSDYDVDHIVPQSFLKDDSIDNKVLTRSDKNRGKSDNVPSEEVVKKMKNYWRQLLNAKLITQRKFDNLTKAERGGLSELDKAGFIKRQLVETRQITKHVAQILDSRMNTKYDENDKLIREVKVITLKSKLVSDFRKDFQFYKVREINNYHHAHDAYLNAVVGTALIKKYPKLESEFVYGDYKVYDVRKMIAKSEQSGGSGGSGGSTNLSDIIEKETGKQLVIQESILMLPEEVEEVIGNKPESDILVHTAYDESTDENVMLLTSDAPEYKPWALVIQDSNGENKIKMLSGGSGGSGGSTNLSDIIEKETGKQLVIQESILMLPEEVEEVIGNKPESDILVHTAYDESTDENVMLLTSDAPEYKPWALVIQDSNGENKIKMLSGGSKRTADGSEFEPKKKRKV

SEQ ID NO: 372 - protein, 1874 aa, Artificial Sequence
  Synthetic
MKRTADGSEFESPKKKRKVSSETGPVAVDPTLRRRIEPHEFEVFFDPRELRKETCLLYEINWGGRHSIWRHTSQNTNKHVEVNFIEKFTTERYFCPNTRCSITWFLSYSPCGECSRAITEFLSRYPHVTLFIYIARLYHHADPRNRQGLEDLISSGVTIQIMTEQESGYCWRNFVNYSPSNEAHWPRYPHLWVRLYVLELYCIILGLPPCLNILRRKQPQLTFFTIALQSCHYQRLPPHILWATGLKSGGSSGGSSGSETPGTSESATPESSGGSSGGSEIGKATAKYFFYSNIMNFFKTEITLANGEIRKRPLIETNGETGEIVWDKGRDFATVRKVLSMPQVNIVKKTEVQTGGFSKESILPKRNSDKLIARKKDWDPKKYGGFDSPTVAYSVLVVAKVEKGKSKKLKSVKELLGITIMERSSFEKNPIDFLEAKGYKEVKKDLIIKLPKYSLFELENGRKRMLASAGELQKGNELALPSKYVNFLYLASHYEKLKGSPEDNEQKQLFVEQHKHYLDEIIEQISEFSKRVILADANLDKVLSAYNKHRDKPIREQAENIIHLFTLTNLGAPAAFKYFDTTIDRKRYTSTKEVLDATLIHQSITGLYETRIDLSQLGGDGGSGGSGGSGGSGGSGGSGGMDKKYSIGLAIGTNSVGWAVITDEYKVPSKKFKVLGNTDRHSIKKNLIGALLFDSGETAEATRLKRTARRRYTRRKNRICYLQEIFSNEMAKVDDSFFHRLEESFLVEEDKKHERHPIFGNIVDEVAYHEKYPTIYHLRKKLVDSTDKADLRLIYLALAHMIKFRGHFLIEGDLNPDNSDVDKLFIQLVQTYNQLFEENPINASGVDAKAILSARLSKSRRLENLIAQLPGEKKNGLFGNLIALSLGLTPNFKSNFDLAEDAKLQLSKDTYDDDLDNLLAQIGDQYADLFLAAKNLSDAILLSDILRVNTEITKAPLSASMIKRYDEHHQDLTLLKALVRQQLPEKYKEIFFDQSKNGYAGYIDGGASQEEFYKFIKPILEKMDGTEELLVKLNREDLLRKQRTFDNGSIPHQIHLGELHAILRRQEDFYPFLKDNREKIEKILTFRIPYYVGPLARGNSRFAWMTRKSEETITPWNFEEVVDKGASAQSFIERMTNFDKNLPNEKVLPKHSLLYEYFTVYNELTKVKYVTEGMRKPAFLSGEQKKAIVDLLFKTNRKVTVKQLKEDYFKKIECFDSVEISGVEDRFNASLGTYHDLLKIIKDKDFLDNEENEDILEDIVLTLTLFEDREMIEERLKTYAHLFDDKVMKQLKRRRYTGWGRLSRKLINGIRDKQSGKTILDFLKSDGFANRNFMQLIHDDSLTFKEDIQKAQVSGQGDSLHEHIANLAGSPAIKKGILQTVKVVDELVKVMGRHKPENIVIEMARENQTTQKGQKNSRERMKRIEEGIKELGSQILKEHPVENTQLQNEKLYLYYLQNGRDMYVDQELDINRLSDYDVDHIVPQSFLKDDSIDNKVLTRSDKNRGKSDNVPSEEVVKKMKNYWRQLLNAKLITQRKFDNLTKAERGGLSELDKAGFIKRQLVETRQITKHVAQILDSRMNTKYDENDKLIREVKVITLKSKLVSDFRKDFQFYKVREINNYHHAHDAYLNAVVGTALIKKYPKLESEFVYGDYKVYDVRKMIAKSEQSGGSGGSGGSTNLSDIIEKETGKQLVIQESILMLPEEVEEVIGNKPESDILVHTAYDESTDENVMLLTSDAPEYKPWALVIQDSNGENKIKMLSGGSGGSGGSTNLSDIIEKETGKQLVIQESILMLPEEVEEVIGNKPESDILVHTAYDESTDENVMLLTSDAPEYKPWALVIQDSNGENKIKMLSGGSKRTADGSEFEPKKKRKV

SEQ ID NO: 373 - protein, 1874 aa, Artificial Sequence
  Synthetic
MKRTADGSEFESPKKKRKVSSETGPVAVDPTLRRRIEPHEFEVFFDPRELRKETCLLYEINWGGRHSIWRHTSQNTNKHVEVNFIEKFTTERYFCPNTRCSITWFLSYSPCGECSRAITEFLSRYPHVTLFIYIARLYHHADPENRQGLEDLISSGVTIQIMTEQESGYCWRNFVNYSPSNEAHWPRYPHLWVRLYVLELYCIILGLPPCLNILRRKQPQLTFFTIALQSCHYQRLPPHILWATGLKSGGSSGGSSGSETPGTSESATPESSGGSSGGSEIGKATAKYFFYSNIMNFFKTEITLANGEIRKRPLIETNGETGEIVWDKGRDFATVRKVLSMPQVNIVKKTEVQTGGFSKESILPKRNSDKLIARKKDWDPKKYGGFDSPTVAYSVLVVAKVEKGKSKKLKSVKELLGITIMERSSFEKNPIDFLEAKGYKEVKKDLIIKLPKYSLFELENGRKRMLASAGELQKGNELALPSKYVNFLYLASHYEKLKGSPEDNEQKQLFVEQHKHYLDEIIEQISEFSKRVILADANLDKVLSAYNKHRDKPIREQAENIIHLFTLTNLGAPAAFKYFDTTIDRKRYTSTKEVLDATLIHQSITGLYETRIDLSQLGGDGGSGGSGGSGGSGGSGGSGGMDKKYSIGLAIGTNSVGWAVITDEYKVPSKKFKVLGNTDRHSIKKNLIGALLFDSGETAEATRLKRTARRRYTRRKNRICYLQEIFSNEMAKVDDSFFHRLEESFLVEEDKKHERHPIFGNIVDEVAYHEKYPTIYHLRKKLVDSTDKADLRLIYLALAHMIKFRGHFLIEGDLNPDNSDVDKLFIQLVQTYNQLFEENPINASGVDAKAILSARLSKSRRLENLIAQLPGEKKNGLFGNLIALSLGLTPNFKSNFDLAEDAKLQLSKDTYDDDLDNLLAQIGDQYADLFLAAKNLSDAILLSDILRVNTEITKAPLSASMIKRYDEHHQDLTLLKALVRQQLPEKYKEIFFDQSKNGYAGYIDGGASQEEFYKFIKPILEKMDGTEELLVKLNREDLLRKQRTFDNGSIPHQIHLGELHAILRRQEDFYPFLKDNREKIEKILTFRIPYYVGPLARGNSRFAWMTRKSEETITPWNFEEVVDKGASAQSFIERMTNFDKNLPNEKVLPKHSLLYEYFTVYNELTKVKYVTEGMRKPAFLSGEQKKAIVDLLFKTNRKVTVKQLKEDYFKKIECFDSVEISGVEDRFNASLGTYHDLLKIIKDKDFLDNEENEDILEDIVLTLTLFEDREMIEERLKTYAHLFDDKVMKQLKRRRYTGWGRLSRKLINGIRDKQSGKTILDFLKSDGFANRNFMQLIHDDSLTFKEDIQKAQVSGQGDSLHEHIANLAGSPAIKKGILQTVKVVDELVKVMGRHKPENIVIEMARENQTTQKGQKNSRERMKRIEEGIKELGSQILKEHPVENTQLQNEKLYLYYLQNGRDMYVDQELDINRLSDYDVDHIVPQSFLKDDSIDNKVLTRSDKNRGKSDNVPSEEVVKKMKNYWRQLLNAKLITQRKFDNLTKAERGGLSELDKAGFIKRQLVETRQITKHVAQILDSRMNTKYDENDKLIREVKVITLKSKLVSDFRKDFQFYKVREINNYHHAHDAYLNAVVGTALIKKYPKLESEFVYGDYKVYDVRKMIAKSEQSGGSGGSGGSTNLSDIIEKETGKQLVIQESILMLPEEVEEVIGNKPESDILVHTAYDESTDENVMLLTSDAPEYKPWALVIQDSNGENKIKMLSGGSGGSGGSTNLSDIIEKETGKQLVIQESILMLPEEVEEVIGNKPESDILVHTAYDESTDENVMLLTSDAPEYKPWALVIQDSNGENKIKMLSGGSKRTADGSEFEPKKKRKV

SEQ ID NO: 374 - protein, 1874 aa, Artificial Sequence
  Synthetic
MKRTADGSEFESPKKKRKVSSETGPVAVDPTLRRRIEPHEFEVFFDPRELRKETCLLYEINWGGRHSIWRHTSQNTNKHVEVNFIEKFTTERYFCPNTRCSITWFLSWSPCGECSRAITEFLSRYPHVTLFIYIARLYHHADPENRQGLEDLISSGVTIQIMTEQESGYCWRNFVNYSPSNEAHWPRYPHLWVRLYVLELYCIILGLPPCLNILRRKQPQLTFFTIALQSCHYQRLPPHILWATGLKSGGSSGGSSGSETPGTSESATPESSGGSSGGSEIGKATAKYFFYSNIMNFFKTEITLANGEIRKRPLIETNGETGEIVWDKGRDFATVRKVLSMPQVNIVKKTEVQTGGFSKESILPKRNSDKLIARKKDWDPKKYGGFDSPTVAYSVLVVAKVEKGKSKKLKSVKELLGITIMERSSFEKNPIDFLEAKGYKEVKKDLIIKLPKYSLFELENGRKRMLASAGELQKGNELALPSKYVNFLYLASHYEKLKGSPEDNEQKQLFVEQHKHYLDEIIEQISEFSKRVILADANLDKVLSAYNKHRDKPIREQAENIIHLFTLTNLGAPAAFKYFDTTIDRKRYTSTKEVLDATLIHQSITGLYETRIDLSQLGGDGGSGGSGGSGGSGGSGGSGGMDKKYSIGLAIGTNSVGWAVITDEYKVPSKKFKVLGNTDRHSIKKNLIGALLFDSGETAEATRLKRTARRRYTRRKNRICYLQEIFSNEMAKVDDSFFHRLEESFLVEEDKKHERHPIFGNIVDEVAYHEKYPTIYHLRKKLVDSTDKADLRLIYLALAHMIKFRGHFLIEGDLNPDNSDVDKLFIQLVQTYNQLFEENPINASGVDAKAILSARLSKSRRLENLIAQLPGEKKNGLFGNLIALSLGLTPNFKSNFDLAEDAKLQLSKDTYDDDLDNLLAQIGDQYADLFLAAKNLSDAILLSDILRVNTEITKAPLSASMIKRYDEHHQDLTLLKALVRQQLPEKYKEIFFDQSKNGYAGYIDGGASQEEFYKFIKPILEKMDGTEELLVKLNREDLLRKQRTFDNGSIPHQIHLGELHAILRRQEDFYPFLKDNREKIEKILTFRIPYYVGPLARGNSRFAWMTRKSEETITPWNFEEVVDKGASAQSFIERMTNFDKNLPNEKVLPKHSLLYEYFTVYNELTKVKYVTEGMRKPAFLSGEQKKAIVDLLFKTNRKVTVKQLKEDYFKKIECFDSVEISGVEDRFNASLGTYHDLLKIIKDKDFLDNEENEDILEDIVLTLTLFEDREMIEERLKTYAHLFDDKVMKQLKRRRYTGWGRLSRKLINGIRDKQSGKTILDFLKSDGFANRNFMQLIHDDSLTFKEDIQKAQVSGQGDSLHEHIANLAGSPAIKKGILQTVKVVDELVKVMGRHKPENIVIEMARENQTTQKGQKNSRERMKRIEEGIKELGSQILKEHPVENTQLQNEKLYLYYLQNGRDMYVDQELDINRLSDYDVDHIVPQSFLKDDSIDNKVLTRSDKNRGKSDNVPSEEVVKKMKNYWRQLLNAKLITQRKFDNLTKAERGGLSELDKAGFIKRQLVETRQITKHVAQILDSRMNTKYDENDKLIREVKVITLKSKLVSDFRKDFQFYKVREINNYHHAHDAYLNAVVGTALIKKYPKLESEFVYGDYKVYDVRKMIAKSEQSGGSGGSGGSTNLSDIIEKETGKQLVIQESILMLPEEVEEVIGNKPESDILVHTAYDESTDENVMLLTSDAPEYKPWALVIQDSNGENKIKMLSGGSGGSGGSTNLSDIIEKETGKQLVIQESILMLPEEVEEVIGNKPESDILVHTAYDESTDENVMLLTSDAPEYKPWALVIQDSNGENKIKMLSGGSKRTADGSEFEPKKKRKV

SEQ ID NO: 375 - protein, 1874 aa, Artificial Sequence
  Synthetic
MKRTADGSEFESPKKKRKVSSETGPVAVDPTLRRRIEPHEFEVFFDPRELAAETCLLYEINWGGRHSIWRHTSQNTNKHVEVNFIEKFTTERYFCPNTRCSITWFLSWSPCGECSRAITEFLSRYPHVTLFIYIARLYHHADPRNRQGLRDLISSGVTIQIMTEQESGYCWRNFVNYSPSNEAHWPRYPHLWVRLYVLELYCIILGLPPCLNILRRKQPQLTFFTIALQSCHYQRLPPHILWATGLKSGGSSGGSSGSETPGTSESATPESSGGSSGGSEIGKATAKYFFYSNIMNFFKTEITLANGEIRKRPLIETNGETGEIVWDKGRDFATVRKVLSMPQVNIVKKTEVQTGGFSKESILPKRNSDKLIARKKDWDPKKYGGFDSPTVAYSVLVVAKVEKGKSKKLKSVKELLGITIMERSSFEKNPIDFLEAKGYKEVKKDLIIKLPKYSLFELENGRKRMLASAGELQKGNELALPSKYVNFLYLASHYEKLKGSPEDNEQKQLFVEQHKHYLDEIIEQISEFSKRVILADANLDKVLSAYNKHRDKPIREQAENIIHLFTLTNLGAPAAFKYFDTTIDRKRYTSTKEVLDATLIHQSITGLYETRIDLSQLGGDGGSGGSGGSGGSGGSGGSGGMDKKYSIGLAIGTNSVGWAVITDEYKVPSKKFKVLGNTDRHSIKKNLIGALLFDSGETAEATRLKRTARRRYTRRKNRICYLQEIFSNEMAKVDDSFFHRLEESFLVEEDKKHERHPIFGNIVDEVAYHEKYPTIYHLRKKLVDSTDKADLRLIYLALAHMIKFRGHFLIEGDLNPDNSDVDKLFIQLVQTYNQLFEENPINASGVDAKAILSARLSKSRRLENLIAQLPGEKKNGLFGNLIALSLGLTPNFKSNFDLAEDAKLQLSKDTYDDDLDNLLAQIGDQYADLFLAAKNLSDAILLSDILRVNTEITKAPLSASMIKRYDEHHQDLTLLKALVRQQLPEKYKEIFFDQSKNGYAGYIDGGASQEEFYKFIKPILEKMDGTEELLVKLNREDLLRKQRTFDNGSIPHQIHLGELHAILRRQEDFYPFLKDNREKIEKILTFRIPYYVGPLARGNSRFAWMTRKSEETITPWNFEEVVDKGASAQSFIERMTNFDKNLPNEKVLPKHSLLYEYFTVYNELTKVKYVTEGMRKPAFLSGEQKKAIVDLLFKTNRKVTVKQLKEDYFKKIECFDSVEISGVEDRFNASLGTYHDLLKIIKDKDFLDNEENEDILEDIVLTLTLFEDREMIEERLKTYAHLFDDKVMKQLKRRRYTGWGRLSRKLINGIRDKQSGKTILDFLKSDGFANRNFMQLIHDDSLTFKEDIQKAQVSGQGDSLHEHIANLAGSPAIKKGILQTVKVVDELVKVMGRHKPENIVIEMARENQTTQKGQKNSRERMKRIEEGIKELGSQILKEHPVENTQLQNEKLYLYYLQNGRDMYVDQELDINRLSDYDVDHIVPQSFLKDDSIDNKVLTRSDKNRGKSDNVPSEEVVKKMKNYWRQLLNAKLITQRKFDNLTKAERGGLSELDKAGFIKRQLVETRQITKHVAQILDSRMNTKYDENDKLIREVKVITLKSKLVSDFRKDFQFYKVREINNYHHAHDAYLNAVVGTALIKKYPKLESEFVYGDYKVYDVRKMIAKSEQSGGSGGSGGSTNLSDIIEKETGKQLVIQESILMLPEEVEEVIGNKPESDILVHTAYDESTDENVMLLTSDAPEYKPWALVIQDSNGENKIKMLSGGSGGSGGSTNLSDIIEKETGKQLVIQESILMLPEEVEEVIGNKPESDILVHTAYDESTDENVMLLTSDAPEYKPWALVIQDSNGENKIKMLSGGSKRTADGSEFEPKKKRKV

SEQ ID NO: 376 - protein, 1605 aa, Artificial Sequence
  Synthetic
MKRTADGSEFESPKKKRKVSEVEFSHEYWMRHALTLAKRARDEREVPVGAVLVLNNRVIGEGWNRAIGLHDPTAHAEIMALRQGGLVMQNYRLIDATLYVTFEPCVMCAGAMIHSRIGRVVFGVRNSKRGAAGSLMNVLNYPGMNHRVEITEGILADECAALLCDFYRMPRQVFNAQKKAQSSINSGGSSGGSSGSETPGTSESATPESSGGSSGGSDKKYSIGLAIGTNSVGWAVITDEYKVPSKKFKVLGNTDRHSIKKNLIGALLFDSGETAEATRLKRTARRRYTRRKNRICYLQEIFSNEMAKVDDSFFHRLEESFLVEEDKKHERHPIFGNIVDEVAYHEKYPTIYHLRKKLVDSTDKADLRLIYLALAHMIKFRGHFLIEGDLNPDNSDVDKLFIQLVQTYNQLFEENPINASGVDAKAILSARLSKSRRLENLIAQLPGEKKNGLFGNLIALSLGLTPNFKSNFDLAEDAKLQLSKDTYDDDLDNLLAQIGDQYADLFLAAKNLSDAILLSDILRVNTEITKAPLSASMIKRYDEHHQDLTLLKALVRQQLPEKYKEIFFDQSKNGYAGYIDGGASQEEFYKFIKPILEKMDGTEELLVKLNREDLLRKQRTFDNGSIPHQIHLGELHAILRRQEDFYPFLKDNREKIEKILTFRIPYYVGPLARGNSRFAWMTRKSEETITPWNFEEVVDKGASAQSFIERMTNFDKNLPNEKVLPKHSLLYEYFTVYNELTKVKYVTEGMRKPAFLSGEQKKAIVDLLFKTNRKVTVKQLKEDYFKKIECFDSVEISGVEDRFNASLGTYHDLLKIIKDKDFLDNEENEDILEDIVLTLTLFEDREMIEERLKTYAHLFDDKVMKQLKRRRYTGWGRLSRKLINGIRDKQSGKTILDFLKSDGFANRNFMQLIHDDSLTFKEDIQKAQVSGQGDSLHEHIANLAGSPAIKKGILQTVKVVDELVKVMGRHKPENIVIEMARENQTTQKGQKNSRERMKRIEEGIKELGSQILKEHPVENTQLQNEKLYLYYLQNGRDMYVDQELDINRLSDYDVDHIVPQSFLKDDSIDNKVLTRSDKNRGKSDNVPSEEVVKKMKNYWRQLLNAKLITQRKFDNLTKAERGGLSELDKAGFIKRQLVETRQITKHVAQILDSRMNTKYDENDKLIREVKVITLKSKLVSDFRKDFQFYKVREINNYHHAHDAYLNAVVGTALIKKYPKLESEFVYGDYKVYDVRKMIAKSEQEIGKATAKYFFYSNIMNFFKTEITLANGEIRKRPLIETNGETGEIVWDKGRDFATVRKVLSMPQVNIVKKTEVQTGGFSKESILPKRNSDKLIARKKDWDPKKYGGFDSPTVAYSVLVVAKVEKGKSKKLKSVKELLGITIMERSSFEKNPIDFLEAKGYKEVKKDLIIKLPKYSLFELENGRKRMLASAGELQKGNELALPSKYVNFLYLASHYEKLKGSPEDNEQKQLFVEQHKHYLDEIIEQISEFSKRVILADANLDKVLSAYNKHRDKPIREQAENIIHLFTLTNLGAPAAFKYFDTTIDRKRYTSTKEVLDATLIHQSITGLYETRIDLSQLGGDSGGSKRTADGSEFEPKKKRKV

SEQ ID NO: 377 - protein, 1803 aa, Artificial Sequence
  Synthetic
MKRTADGSEFESPKKKRKVSEVEFSHEYWMRHALTLAKRAWDEREVPVGAVLVHNNRVIGEGWNRPIGRHDPTAHAEIMALRQGGLVMQNYRLIDATLYVTLEPCVMCAGAMIHSRIGRVVFGARDAKTGAAGSLMDVLHHPGMNHRVEITEGILADECAALLSDFFRMRRQEIKAQKKAQSSTDSGGSSGGSSGSETPGTSESATPESSGGSSGGSSEVEFSHEYWMRHALTLAKRARDEREVPVGAVLVLNNRVIGEGWNRAIGLHDPTAHAEIMALRQGGLVMQNYRLIDATLYVTFEPCVMCAGAMIHSRIGRVVFGVRNSKRGAAGSLMNVLNYPGMNHRVEITEGILADECAALLCDFYRMPRQVFNAQKKAQSSINSGGSSGGSSGSETPGTSESATPESSGGSSGGSDKKYSIGLAIGTNSVGWAVITDEYKVPSKKFKVLGNTDRHSIKKNLIGALLFDSGETAEATRLKRTARRRYTRRKNRICYLQEIFSNEMAKVDDSFFHRLEESFLVEEDKKHERHPIFGNIVDEVAYHEKYPTIYHLRKKLVDSTDKADLRLIYLALAHMIKFRGHFLIEGDLNPDNSDVDKLFIQLVQTYNQLFEENPINASGVDAKAILSARLSKSRRLENLIAQLPGEKKNGLFGNLIALSLGLTPNFKSNFDLAEDAKLQLSKDTYDDDLDNLLAQIGDQYADLFLAAKNLSDAILLSDILRVNTEITKAPLSASMIKRYDEHHQDLTLLKALVRQQLPEKYKEIFFDQSKNGYAGYIDGGASQEEFYKFIKPILEKMDGTEELLVKLNREDLLRKQRTFDNGSIPHQIHLGELHAILRRQEDFYPFLKDNREKIEKILTFRIPYYVGPLARGNSRFAWMTRKSEETITPWNFEEVVDKGASAQSFIERMTNFDKNLPNEKVLPKHSLLYEYFTVYNELTKVKYVTEGMRKPAFLSGEQKKAIVDLLFKTNRKVTVKQLKEDYFKKIECFDSVEISGVEDRFNASLGTYHDLLKIIKDKDFLDNEENEDILEDIVLTLTLFEDREMIEERLKTYAHLFDDKVMKQLKRRRYTGWGRLSRKLINGIRDKQSGKTILDFLKSDGFANRNFMQLIHDDSLTFKEDIQKAQVSGQGDSLHEHIANLAGSPAIKKGILQTVKVVDELVKVMGRHKPENIVIEMARENQTTQKGQKNSRERMKRIEEGIKELGSQILKEHPVENTQLQNEKLYLYYLQNGRDMYVDQELDINRLSDYDVDHIVPQSFLKDDSIDNKVLTRSDKNRGKSDNVPSEEVVKKMKNYWRQLLNAKLITQRKFDNLTKAERGGLSELDKAGFIKRQLVETRQITKHVAQILDSRMNTKYDENDKLIREVKVITLKSKLVSDFRKDFQFYKVREINNYHHAHDAYLNAVVGTALIKKYPKLESEFVYGDYKVYDVRKMIAKSEQEIGKATAKYFFYSNIMNFFKTEITLANGEIRKRPLIETNGETGEIVWDKGRDFATVRKVLSMPQVNIVKKTEVQTGGFSKESILPKRNSDKLIARKKDWDPKKYGGFDSPTVAYSVLVVAKVEKGKSKKLKSVKELLGITIMERSSFEKNPIDFLEAKGYKEVKKDLIIKLPKYSLFELENGRKRMLASAGELQKGNELALPSKYVNFLYLASHYEKLKGSPEDNEQKQLFVEQHKHYLDEIIEQISEFSKRVILADANLDKVLSAYNKHRDKPIREQAENIIHLFTLTNLGAPAAFKYFDTTIDRKRYTSTKEVLDATLIHQSITGLYETRIDLSQLGGDSGGSKRTADGSEFEPKKKRKV

SEQ ID NO: 378 - protein, 1291 aa, Artificial Sequence
  Synthetic
MKRTADGSEFESPKKKRKVSEVEFSHEYWMRHALTLAKRARDEREVPVGAVLVLNNRVIGEGWNRAIGLHDPTAHAEIMALRQGGLVMQNYRLIDATLYVTFEPCVMCAGAMIHSRIGRVVFGVRNSKRGAAGSLMNVLNYPGMNHRVEITEGILADECAALLCDFYRMPRQVFNAQKKAQSSINSGGSSGGSSGSETPGTSESATPESSGGSSGGSGKRNYILGLAIGITSVGYGIIDYETRDVIDAGVRLFKEANVENNEGRRSKRGARRLKRRRRHRIQRVKKLLFDYNLLTDHSELSGINPYEARVKGLSQKLSEEEFSAALLHLAKRRGVHNVNEVEEDTGNELSTKEQISRNSKALEEKYVAELQLERLKKDGEVRGSINRFKTSDYVKEAKQLLKVQKAYHQLDQSFIDTYIDLLETRRTYYEGPGEGSPFGWKDIKEWYEMLMGHCTYFPEELRSVKYAYNADLYNALNDLNNLVITRDENEKLEYYEKFQIIENVFKQKKKPTLKQIAKEILVNEEDIKGYRVTSTGKPEFTNLKVYHDIKDITARKEIIENAELLDQIAKILTIYQSSEDIQEELTNLNSELTQEEIEQISNLKGYTGTHNLSLKAINLILDELWHTNDNQIAIFNRLKLVPKKVDLSQQKEIPTTLVDDFILSPVVKRSFIQSIKVINAIIKKYGLPNDIIIELAREKNSKDAQKMINEMQKRNRQTNERIEEIIRTTGKENAKYLIEKIKLHDMQEGKCLYSLEAIPLEDLLNNPFNYEVDHIIPRSVSFDNSFNNKVLVKQEENSKKGNRTPFQYLSSSDSKISYETFKKHILNLAKGKGRISKTKKEYLLEERDINRFSVQKDFINRNLVDTRYATRGLMNLLRSYFRVNNLDVKVKSINGGFTSFLRRKWKFKKERNKGYKHHAEDALIIANADFIFKEWKKLDKAKKVMENQMFEEKQAESMPEIETEQEYKEIFITPHQIKHIKDFKDYKYSHRVDKKPNRELINDTLYSTRKDDKGNTLIVNNLNGLYDKDNDKLKKLINKSPEKLLMYHHDPQTYQKLKLIMEQYGDEKNPLYKYYEETGNYLTKYSKKDNGPVIKKIKYYGNKLNAHLDITDDYPNSRNKVVKLSLKPYRFDVYLDNGVYKFVTVKNLDVIKKENYYEVNSKCYEEAKKLKKISNQAEFIASFYNNDLIKINGELYRVIGVNNDLLNRIEVNMIDITYREYLENMNDKRPPRIIKTIASKTQSIKKYSTDILGNLYEVKSKKHPQIIKKGSGGSKRTADGSEFEPKKKRKV

SEQ ID NO: 379 - protein, 1489 aa, Artificial Sequence
  Synthetic
MKRTADGSEFESPKKKRKVSEVEFSHEYWMRHALTLAKRAWDEREVPVGAVLVHNNRVIGEGWNRPIGRHDPTAHAEIMALRQGGLVMQNYRLIDATLYVTLEPCVMCAGAMIHSRIGRVVFGARDAKTGAAGSLMDVLHHPGMNHRVEITEGILADECAALLSDFFRMRRQEIKAQKKAQSSTDSGGSSGGSSGSETPGTSESATPESSGGSSGGSSEVEFSHEYWMRHALTLAKRARDEREVPVGAVLVLNNRVIGEGWNRAIGLHDPTAHAEIMALRQGGLVMQNYRLIDATLYVTFEPCVMCAGAMIHSRIGRVVFGVRNSKRGAAGSLMNVLNYPGMNHRVEITEGILADECAALLCDFYRMPRQVFNAQKKAQSSINSGGSSGGSSGSETPGTSESATPESSGGSSGGSGKRNYILGLAIGITSVGYGIIDYETRDVIDAGVRLFKEANVENNEGRRSKRGARRLKRRRRHRIQRVKKLLFDYNLLTDHSELSGINPYEARVKGLSQKLSEEEFSAALLHLAKRRGVHNVNEVEEDTGNELSTKEQISRNSKALEEKYVAELQLERLKKDGEVRGSINRFKTSDYVKEAKQLLKVQKAYHQLDQSFIDTYIDLLETRRTYYEGPGEGSPFGWKDIKEWYEMLMGHCTYFPEELRSVKYAYNADLYNALNDLNNLVITRDENEKLEYYEKFQIIENVFKQKKKPTLKQIAKEILVNEEDIKGYRVTSTGKPEFTNLKVYHDIKDITARKEIIENAELLDQIAKILTIYQSSEDIQEELTNLNSELTQEEIEQISNLKGYTGTHNLSLKAINLILDELWHTNDNQIAIFNRLKLVPKKVDLSQQKEIPTTLVDDFILSPVVKRSFIQSIKVINAIIKKYGLPNDIIIELAREKNSKDAQKMINEMQKRNRQTNERIEEIIRTTGKENAKYLIEKIKLHDMQEGKCLYSLEAIPLEDLLNNPFNYEVDHIIPRSVSFDNSFNNKVLVKQEENSKKGNRTPFQYLSSSDSKISYETFKKHILNLAKGKGRISKTKKEYLLEERDINRFSVQKDFINRNLVDTRYATRGLMNLLRSYFRVNNLDVKVKSINGGFTSFLRRKWKFKKERNKGYKHHAEDALIIANADFIFKEWKKLDKAKKVMENQMFEEKQAESMPEIETEQEYKEIFITPHQIKHIKDFKDYKYSHRVDKKPNRELINDTLYSTRKDDKGNTLIVNNLNGLYDKDNDKLKKLINKSPEKLLMYHHDPQTYQKLKLIMEQYGDEKNPLYKYYEETGNYLTKYSKKDNGPVIKKIKYYGNKLNAHLDITDDYPNSRNKVVKLSLKPYRFDVYLDNGVYKFVTVKNLDVIKKENYYEVNSKCYEEAKKLKKISNQAEFIASFYNNDLIKINGELYRVIGVNNDLLNRIEVNMIDITYREYLENMNDKRPPRIIKTIASKTQSIKKYSTDILGNLYEVKSKKHPQIIKKGSGGSKRTADGSEFEPKKKRKV

SEQ ID NO: 380 - protein, 1464 aa, Artificial Sequence
  Synthetic
MKRTADGSEFESPKKKRKVSEVEFSHEYWMRHALTLAKRARDEREVPVGAVLVLNNRVIGEGWNRAIGLHDPTAHAEIMALRQGGLVMQNYRLIDATLYVTFEPCVMCAGAMIHSRIGRVVFGVRNSKRGAAGSLMNVLNYPGMNHRVEITEGILADECAALLCDFYRMPRQVFNAQKKAQSSINSGGSSGGSSGSETPGTSESATPESSGGSSGGSSKLEKFTNCYSLSKTLRFKAIPVGKTQENIDNKRLLVEDEKRAEDYKGVKKLLDRYYLSFINDVLHSIKLKNLNNYISLFRKKTRTEKENKELENLEINLRKEIAKAFKGNEGYKSLFKKDIIETILPEFLDDKDEIALVNSFNGFTTAFTGFFDNRENMFSEEAKSTSIAFRCINENLTRYISNMDIFEKVDAIFDKHEVQEIKEKILNSDYDVEDFFEGEFFNFVLTQEGIDVYNAIIGGFVTESGEKIKGLNEYINLYNQKTKQKLPKFKPLYKQVLSDRESLSFYGEGYTSDEEVLEVFRNTLNKNSEIFSSIKKLEKLFKNFDEYSSAGIFVKNGPAISTISKDIFGEWNVIRDKWNAEYDDIHLKKKAVVTEKYEDDRRKSFKKIGSFSLEQLQEYADADLSVVEKLKEIIIQKVDEIYKVYGSSEKLFDADFVLEKSLKKNDAVVAIMKDLLDSVKSFENYIKAFFGEGKETNRDESFYGDFVLAYDILLKVDHIYDAIRNYVTQKPYSKDKFKLYFQNPQFMGGWDKDKETDYRATILRYGSKYYLAIMDKKYAKCLQKIDKDDVNGNYEKINYKLLPGPNKMLPKVFFSKKWMAYYNPSEDIQKIYKNGTFKKGDMFNLNDCHKLIDFFKDSISRYPKWSNAYDFNFSETEKYKDIAGFYREVEEQGYKVSFESASKKEVDKLVEEGKLYMFQIYNKDFSDKSHGTPNLHTMYFKLLFDENNHGQIRLSGGAELFMRRASLKKEELVVHPANSPIANKNPDNPKKTTTLSYDVYKDKRFSEDQYELHIPIAINKCPKNIFKINTEVRVLLKHDDNPYVIGIARGERNLLYIVVVDGKGNIVEQYSLNEIINNFNGIRIKTDYHSLLDKKEKERFEARQNWTSIENIKELKAGYISQVVHKICELVEKYDAVIALEDLNSGFKNSRVKVEKQVYQKFEKMLIDKLNYMVDKKSNPCATGGALKGYQITNKFESFKSMSTQNGFIFYIPAWLTSKIDPSTGFVNLLKTKYTSIADSKKFISSFDRIMYVPEEDLFEFALDYKNFSRTDADYIKKWKLYSYGNRIRIFRNPKKNNVFDWEEVCLTSAYKELFNKYGINYQQGDIRALLCEQSDKAFYSSFMALMSLMLQMRNSITGRTDVDFLISPVKNSDGIFYDSRNYEAQENAILPKNADANGAYNIARKVLWAIGQFKKAEDEKLDKVKIAISNKEWLEYAQTSVKSGGSKRTADGSEFEPKKKRKV

SEQ ID NO: 381 - protein, 1662 aa, Artificial Sequence
  Synthetic
MKRTADGSEFESPKKKRKVSEVEFSHEYWMRHALTLAKRAWDEREVPVGAVLVHNNRVIGEGWNRPIGRHDPTAHAEIMALRQGGLVMQNYRLIDATLYVTLEPCVMCAGAMIHSRIGRVVFGARDAKTGAAGSLMDVLHHPGMNHRVEITEGILADECAALLSDFFRMRRQEIKAQKKAQSSTDSGGSSGGSSGSETPGTSESATPESSGGSSGGSSEVEFSHEYWMRHALTLAKRARDEREVPVGAVLVLNNRVIGEGWNRAIGLHDPTAHAEIMALRQGGLVMQNYRLIDATLYVTFEPCVMCAGAMIHSRIGRVVFGVRNSKRGAAGSLMNVLNYPGMNHRVEITEGILADECAALLCDFYRMPRQVFNAQKKAQSSINSGGSSGGSSGSETPGTSESATPESSGGSSGGSSKLEKFTNCYSLSKTLRFKAIPVGKTQENIDNKRLLVEDEKRAEDYKGVKKLLDRYYLSFINDVLHSIKLKNLNNYISLFRKKTRTEKENKELENLEINLRKEIAKAFKGNEGYKSLFKKDIIETILPEFLDDKDEIALVNSFNGFTTAFTGFFDNRENMFSEEAKSTSIAFRCINENLTRYISNMDIFEKVDAIFDKHEVQEIKEKILNSDYDVEDFFEGEFFNFVLTQEGIDVYNAIIGGFVTESGEKIKGLNEYINLYNQKTKQKLPKFKPLYKQVLSDRESLSFYGEGYTSDEEVLEVFRNTLNKNSEIFSSIKKLEKLFKNFDEYSSAGIFVKNGPAISTISKDIFGEWNVIRDKWNAEYDDIHLKKKAVVTEKYEDDRRKSFKKIGSFSLEQLQEYADADLSVVEKLKEIIIQKVDEIYKVYGSSEKLFDADFVLEKSLKKNDAVVAIMKDLLDSVKSFENYIKAFFGEGKETNRDESFYGDFVLAYDILLKVDHIYDAIRNYVTQKPYSKDKFKLYFQNPQFMGGWDKDKETDYRATILRYGSKYYLAIMDKKYAKCLQKIDKDDVNGNYEKINYKLLPGPNKMLPKVFFSKKWMAYYNPSEDIQKIYKNGTFKKGDMFNLNDCHKLIDFFKDSISRYPKWSNAYDFNFSETEKYKDIAGFYREVEEQGYKVSFESASKKEVDKLVEEGKLYMFQIYNKDFSDKSHGTPNLHTMYFKLLFDENNHGQIRLSGGAELFMRRASLKKEELVVHPANSPIANKNPDNPKKTTTLSYDVYKDKRFSEDQYELHIPIAINKCPKNIFKINTEVRVLLKHDDNPYVIGIARGERNLLYIVVVDGKGNIVEQYSLNEIINNFNGIRIKTDYHSLLDKKEKERFEARQNWTSIENIKELKAGYISQVVHKICELVEKYDAVIALEDLNSGFKNSRVKVEKQVYQKFEKMLIDKLNYMVDKKSNPCATGGALKGYQITNKFESFKSMSTQNGFIFYIPAWLTSKIDPSTGFVNLLKTKYTSIADSKKFISSFDRIMYVPEEDLFEFALDYKNFSRTDADYIKKWKLYSYGNRIRIFRNPKKNNVFDWEEVCLTSAYKELFNKYGINYQQGDIRALLCEQSDKAFYSSFMALMSLMLQMRNSITGRTDVDFLISPVKNSDGIFYDSRNYEAQENAILPKNADANGAYNIARKVLWAIGQFKKAEDEKLDKVKIAISNKEWLEYAQTSVKSGGSKRTADGSEFEPKKKRKV

SEQ ID NO: 382 - protein, 1662 aa, Artificial Sequence
  Synthetic
MKRTADGSEFESPKKKRKVSEVEFSHEYWMRHALTLAKRAWDEREVPVGAVLVHNNRVIGEGWNRPIGRHDPTAHAEIMALRQGGLVMQNYRLIDATLYVTLEPCVMCAGAMIHSRIGRVVFGARDAKTGAAGSLMDVLHHPGMNHRVEITEGILADECAALLSDFFRMRRQEIKAQKKAQSSTDSGGSSGGSSGSETPGTSESATPESSGGSSGGSSEVEFSHEYWMRHALTLAKRARDEREVPVGAVLVLNNRVIGEGWNRAIGLHDPTAHAEIMALRQGGLVMQNYRLIDATLYVTFEPCVMCAGAMIHSRIGRVVFGVRNAKTGAAGSLMDVLHYPGMNHRVEITEGILADECAALLCYFFRMPRQVFNAQKKAQSSTDSGGSSGGSSGSETPGTSESATPESSGGSSGGSSKLEKFTNCYSLSKTLRFKAIPVGKTQENIDNKRLLVEDEKRAEDYKGVKKLLDRYYLSFINDVLHSIKLKNLNNYISLFRKKTRTEKENKELENLEINLRKEIAKAFKGNEGYKSLFKKDIIETILPEFLDDKDEIALVNSFNGFTTAFTGFFDNRENMFSEEAKSTSIAFRCINENLTRYISNMDIFEKVDAIFDKHEVQEIKEKILNSDYDVEDFFEGEFFNFVLTQEGIDVYNAIIGGFVTESGEKIKGLNEYINLYNQKTKQKLPKFKPLYKQVLSDRESLSFYGEGYTSDEEVLEVFRNTLNKNSEIFSSIKKLEKLFKNFDEYSSAGIFVKNGPAISTISKDIFGEWNVIRDKWNAEYDDIHLKKKAVVTEKYEDDRRKSFKKIGSFSLEQLQEYADADLSVVEKLKEIIIQKVDEIYKVYGSSEKLFDADFVLEKSLKKNDAVVAIMKDLLDSVKSFENYIKAFFGEGKETNRDESFYGDFVLAYDILLKVDHIYDAIRNYVTQKPYSKDKFKLYFQNPQFMGGWDKDKETDYRATILRYGSKYYLAIMDKKYAKCLQKIDKDDVNGNYEKINYKLLPGPNKMLPKVFFSKKWMAYYNPSEDIQKIYKNGTFKKGDMFNLNDCHKLIDFFKDSISRYPKWSNAYDFNFSETEKYKDIAGFYREVEEQGYKVSFESASKKEVDKLVEEGKLYMFQIYNKDFSDKSHGTPNLHTMYFKLLFDENNHGQIRLSGGAELFMRRASLKKEELVVHPANSPIANKNPDNPKKTTTLSYDVYKDKRFSEDQYELHIPIAINKCPKNIFKINTEVRVLLKHDDNPYVIGIARGERNLLYIVVVDGKGNIVEQYSLNEIINNFNGIRIKTDYHSLLDKKEKERFEARQNWTSIENIKELKAGYISQVVHKICELVEKYDAVIALEDLNSGFKNSRVKVEKQVYQKFEKMLIDKLNYMVDKKSNPCATGGALKGYQITNKFESFKSMSTQNGFIFYIPAWLTSKIDPSTGFVNLLKTKYTSIADSKKFISSFDRIMYVPEEDLFEFALDYKNFSRTDADYIKKWKLYSYGNRIRIFRNPKKNNVFDWEEVCLTSAYKELFNKYGINYQQGDIRALLCEQSDKAFYSSFMALMSLMLQMRNSITGRTDVDFLISPVKNSDGIFYDSRNYEAQENAILPKNADANGAYNIARKVLWAIGQFKKAEDEKLDKVKIAISNKEWLEYAQTSVKSGGSKRTADGSEFEPKKKRKV

SEQ ID NO: 383 - protein, 1545 aa, Artificial Sequence
  Synthetic
MKRTADGSEFESPKKKRKVSEVEFSHEYWMRHALTLAKRARDEREVPVGAVLVLNNRVIGEGWNRAIGLHDPTAHAEIMALRQGGLVMQNYRLIDATLYVTFEPCVMCAGAMIHSRIGRVVFGVRNSKRGAAGSLMNVLNYPGMNHRVEITEGILADECAALLCDFYRMPRQVFNAQKKAQSSINSGGSSGGSSGSETPGTSESATPESSGGSSGGSMTQFEGFTNLYQVSKTLRFELIPQGKTLKHIQEQGFIEEDKARNDHYKELKPIIDRIYKTYADQCLQLVQLDWENLSAAIDSYRKEKTEETRNALIEEQATYRNAIHDYFIGRTDNLTDAINKRHAEIYKGLFKAELFNGKVLKQLGTVTTTEHENALLRSFDKFTTYFSGFYRNRKNVFSAEDISTAIPHRIVQDNFPKFKENCHIFTRLITAVPSLREHFENVKKAIGIFVSTSIEEVFSFPFYNQLLTQTQIDLYNQLLGGISREAGTEKIKGLNEVLNLAIQKNDETAHIIASLPHRFIPLFKQILSDRNTLSFILEEFKSDEEVIQSFCKYKTLLRNENVLETAEALFNELNSIDLTHIFISHKKLETISSALCDHWDTLRNALYERRISELTGKITKSAKEKVQRSLKHEDINLQEIISAAGKELSEAFKQKTSEILSHAHAALDQPLPTTLKKQEEKEILKSQLDSLLGLYHLLDWFAVDESNEVDPEFSARLTGIKLEMEPSLSFYNKARNYATKKPYSVEKFKLNFQMPTLARGWDVNREKNNGAILFVKNGLYYLGIMPKQKGRYKALSFEPTEKTSEGFDKMYYDYFPDAAKMIPKCSTQLKAVTAHFQTHTTPILLSNNFIEPLEITKEIYDLNNPEKEPKKFQTAYAKKTGDQKGYREALCKWIDFTRDFLSKYTKTTSIDLSSLRPSSQYKDLGEYYAELNPLLYHISFQRIAEKEIMDAVETGKLYLFQIYNKDFAKGHHGKPNLHTLYWTGLFSPENLAKTSIKLNGQAELFYRPKSRMKRMAHRLGEKMLNKKLKDQKTPIPDTLYQELYDYVNHRLSHDLSDEARALLPNVITKEVSHEIIKDRRFTSDKFFFHVPITLNYQAANSPSKFNQRVNAYLKEHPETPIIGIARGERNLIYITVIDSTGKILEQRSLNTIQQFDYQKKLDNREKERVAARQAWSVVGTIKDLKQGYLSQVIHEIVDLMIHYQAVVVLENLNFGFKSKRTGIAEKAVYQQFEKMLIDKLNCLVLKDYPAEKVGGVLNPYQLTDQFTSFAKMGTQSGFLFYVPAPYTSKIDPLTGFVDPFVWKTIKNHESRKHFLEGFDFLHYDVKTGDFILHFKMNRNLSFQRGLPGFMPAWDIVFEKNETQFDAKGTPFIAGKRIVPVIENHRFTGRYRDLYPANELIALLEEKGIVFRDGSNILPKLLENDDSHAIDTMVALIRSVLQMRNSNAATGEDYINSPVRDLNGVCFDSRFQNPEWPMDADANGAYHIALKGQLLLNHLKESKDLKLQNGISNQDWLAYIQELRNSGGSKRTADGSEFEPKKKRKV

SEQ ID NO: 384 - protein, 1743 aa, Artificial Sequence
  Synthetic
MKRTADGSEFESPKKKRKVSEVEFSHEYWMRHALTLAKRAWDEREVPVGAVLVHNNRVIGEGWNRPIGRHDPTAHAEIMALRQGGLVMQNYRLIDATLYVTLEPCVMCAGAMIHSRIGRVVFGARDAKTGAAGSLMDVLHHPGMNHRVEITEGILADECAALLSDFFRMRRQEIKAQKKAQSSTDSGGSSGGSSGSETPGTSESATPESSGGSSGGSSEVEFSHEYWMRHALTLAKRARDEREVPVGAVLVLNNRVIGEGWNRAIGLHDPTAHAEIMALRQGGLVMQNYRLIDATLYVTFEPCVMCAGAMIHSRIGRVVFGVRNSKRGAAGSLMNVLNYPGMNHRVEITEGILADECAALLCDFYRMPRQVFNAQKKAQSSINSGGSSGGSSGSETPGTSESATPESSGGSSGGSMTQFEGFTNLYQVSKTLRFELIPQGKTLKHIQEQGFIEEDKARNDHYKELKPIIDRIYKTYADQCLQLVQLDWENLSAAIDSYRKEKTEETRNALIEEQATYRNAIHDYFIGRTDNLTDAINKRHAEIYKGLFKAELFNGKVLKQLGTVTTTEHENALLRSFDKFTTYFSGFYRNRKNVFSAEDISTAIPHRIVQDNFPKFKENCHIFTRLITAVPSLREHFENVKKAIGIFVSTSIEEVFSFPFYNQLLTQTQIDLYNQLLGGISREAGTEKIKGLNEVLNLAIQKNDETAHIIASLPHRFIPLFKQILSDRNTLSFILEEFKSDEEVIQSFCKYKTLLRNENVLETAEALFNELNSIDLTHIFISHKKLETISSALCDHWDTLRNALYERRISELTGKITKSAKEKVQRSLKHEDINLQEIISAAGKELSEAFKQKTSEILSHAHAALDQPLPTTLKKQEEKEILKSQLDSLLGLYHLLDWFAVDESNEVDPEFSARLTGIKLEMEPSLSFYNKARNYATKKPYSVEKFKLNFQMPTLARGWDVNREKNNGAILFVKNGLYYLGIMPKQKGRYKALSFEPTEKTSEGFDKMYYDYFPDAAKMIPKCSTQLKAVTAHFQTHTTPILLSNNFIEPLEITKEIYDLNNPEKEPKKFQTAYAKKTGDQKGYREALCKWIDFTRDFLSKYTKTTSIDLSSLRPSSQYKDLGEYYAELNPLLYHISFQRIAEKEIMDAVETGKLYLFQIYNKDFAKGHHGKPNLHTLYWTGLFSPENLAKTSIKLNGQAELFYRPKSRMKRMAHRLGEKMLNKKLKDQKTPIPDTLYQELYDYVNHRLSHDLSDEARALLPNVITKEVSHEIIKDRRFTSDKFFFHVPITLNYQAANSPSKFNQRVNAYLKEHPETPIIGIARGERNLIYITVIDSTGKILEQRSLNTIQQFDYQKKLDNREKERVAARQAWSVVGTIKDLKQGYLSQVIHEIVDLMIHYQAVVVLENLNFGFKSKRTGIAEKAVYQQFEKMLIDKLNCLVLKDYPAEKVGGVLNPYQLTDQFTSFAKMGTQSGFLFYVPAPYTSKIDPLTGFVDPFVWKTIKNHESRKHFLEGFDFLHYDVKTGDFILHFKMNRNLSFQRGLPGFMPAWDIVFEKNETQFDAKGTPFIAGKRIVPVIENHRFTGRYRDLYPANELIALLEEKGIVFRDGSNILPKLLENDDSHAIDTMVALIRSVLQMRNSNAATGEDYINSPVRDLNGVCFDSRFQNPEWPMDADANGAYHIALKGQLLLNHLKESKDLKLQNGISNQDWLAYIQELRNSGGSKRTADGSEFEPKKKRKV

SEQ ID NO: 385 - protein, 1743 aa, Artificial Sequence
  Synthetic
MKRTADGSEFESPKKKRKVSEVEFSHEYWMRHALTLAKRAWDEREVPVGAVLVHNNRVIGEGWNRPIGRHDPTAHAEIMALRQGGLVMQNYRLIDATLYVTLEPCVMCAGAMIHSRIGRVVFGARDAKTGAAGSLMDVLHHPGMNHRVEITEGILADECAALLSDFFRMRRQEIKAQKKAQSSTDSGGSSGGSSGSETPGTSESATPESSGGSSGGSSEVEFSHEYWMRHALTLAKRARDEREVPVGAVLVLNNRVIGEGWNRAIGLHDPTAHAEIMALRQGGLVMQNYRLIDATLYVTFEPCVMCAGAMIHSRIGRVVFGVRNAKTGAAGSLMDVLHYPGMNHRVEITEGILADECAALLCYFFRMPRQVFNAQKKAQSSTDSGGSSGGSSGSETPGTSESATPESSGGSSGGSMTQFEGFTNLYQVSKTLRFELIPQGKTLKHIQEQGFIEEDKARNDHYKELKPIIDRIYKTYADQCLQLVQLDWENLSAAIDSYRKEKTEETRNALIEEQATYRNAIHDYFIGRTDNLTDAINKRHAEIYKGLFKAELFNGKVLKQLGTVTTTEHENALLRSFDKFTTYFSGFYRNRKNVFSAEDISTAIPHRIVQDNFPKFKENCHIFTRLITAVPSLREHFENVKKAIGIFVSTSIEEVFSFPFYNQLLTQTQIDLYNQLLGGISREAGTEKIKGLNEVLNLAIQKNDETAHIIASLPHRFIPLFKQILSDRNTLSFILEEFKSDEEVIQSFCKYKTLLRNENVLETAEALFNELNSIDLTHIFISHKKLETISSALCDHWDTLRNALYERRISELTGKITKSAKEKVQRSLKHEDINLQEIISAAGKELSEAFKQKTSEILSHAHAALDQPLPTTLKKQEEKEILKSQLDSLLGLYHLLDWFAVDESNEVDPEFSARLTGIKLEMEPSLSFYNKARNYATKKPYSVEKFKLNFQMPTLARGWDVNREKNNGAILFVKNGLYYLGIMPKQKGRYKALSFEPTEKTSEGFDKMYYDYFPDAAKMIPKCSTQLKAVTAHFQTHTTPILLSNNFIEPLEITKEIYDLNNPEKEPKKFQTAYAKKTGDQKGYREALCKWIDFTRDFLSKYTKTTSIDLSSLRPSSQYKDLGEYYAELNPLLYHISFQRIAEKEIMDAVETGKLYLFQIYNKDFAKGHHGKPNLHTLYWTGLFSPENLAKTSIKLNGQAELFYRPKSRMKRMAHRLGEKMLNKKLKDQKTPIPDTLYQELYDYVNHRLSHDLSDEARALLPNVITKEVSHEIIKDRRFTSDKFFFHVPITLNYQAANSPSKFNQRVNAYLKEHPETPIIGIARGERNLIYITVIDSTGKILEQRSLNTIQQFDYQKKLDNREKERVAARQAWSVVGTIKDLKQGYLSQVIHEIVDLMIHYQAVVVLENLNFGFKSKRTGIAEKAVYQQFEKMLIDKLNCLVLKDYPAEKVGGVLNPYQLTDQFTSFAKMGTQSGFLFYVPAPYTSKIDPLTGFVDPFVWKTIKNHESRKHFLEGFDFLHYDVKTGDFILHFKMNRNLSFQRGLPGFMPAWDIVFEKNETQFDAKGTPFIAGKRIVPVIENHRFTGRYRDLYPANELIALLEEKGIVFRDGSNILPKLLENDDSHAIDTMVALIRSVLQMRNSNAATGEDYINSPVRDLNGVCFDSRFQNPEWPMDADANGAYHIALKGQLLLNHLKESKDLKLQNGISNQDWLAYIQELRNSGGSKRTADGSEFEPKKKRKV

SEQ ID NO: 386 - protein, 1605 aa, Artificial Sequence
  Synthetic
MKRTADGSEFESPKKKRKVSEVEFSHEYWMRHALTLAKRARDEREVPVGAVLVLNNRVIGEGWNRAIGLHDPTAHAEIMALRQGGLVMQNYRLIDATLYVTFEPCVMCAGAMIHSRIGRVVFGVRNSKRGAAGSLMNVLNYPGMNHRVEITEGILADECAALLCDFYRMPRQVFNAQKKAQSSINSGGSSGGSSGSETPGTSESATPESSGGSSGGSDKKYSIGLAIGTNSVGWAVITDEYKVPSKKFKVLGNTDRHSIKKNLIGALLFDSGETAEATRLKRTARRRYTRRKNRICYLQEIFSNEMAKVDDSFFHRLEESFLVEEDKKHERHPIFGNIVDEVAYHEKYPTIYHLRKKLVDSTDKADLRLIYLALAHMIKFRGHFLIEGDLNPDNSDVDKLFIQLVQTYNQLFEENPINASGVDAKAILSARLSKSRRLENLIAQLPGEKKNGLFGNLIALSLGLTPNFKSNFDLAEDAKLQLSKDTYDDDLDNLLAQIGDQYADLFLAAKNLSDAILLSDILRVNTEITKAPLSASMIKRYDEHHQDLTLLKALVRQQLPEKYKEIFFDQSKNGYAGYIDGGASQEEFYKFIKPILEKMDGTEELLVKLNREDLLRKQRTFDNGSIPHQIHLGELHAILRRQEDFYPFLKDNREKIEKILTFRIPYYVGPLARGNSRFAWMTRKSEETITPWNFEEVVDKGASAQSFIERMTNFDKNLPNEKVLPKHSLLYEYFTVYNELTKVKYVTEGMRKPAFLSGEQKKAIVDLLFKTNRKVTVKQLKEDYFKKIECFDSVEISGVEDRFNASLGTYHDLLKIIKDKDFLDNEENEDILEDIVLTLTLFEDREMIEERLKTYAHLFDDKVMKQLKRRRYTGWGRLSRKLINGIRDKQSGKTILDFLKSDGFANRNFMQLIHDDSLTFKEDIQKAQVSGQGDSLHEHIANLAGSPAIKKGILQTVKVVDELVKVMGRHKPENIVIEMARENQTTQKGQKNSRERMKRIEEGIKELGSQILKEHPVENTQLQNEKLYLYYLQNGRDMYVDQELDINRLSDYDVDHIVPQSFLKDDSIDNKVLTRSDKNRGKSDNVPSEEVVKKMKNYWRQLLNAKLITQRKFDNLTKAERGGLSELDKAGFIKRQLVETRQITKHVAQILDSRMNTKYDENDKLIREVKVITLKSKLVSDFRKDFQFYKVREINNYHHAHDAYLNAVVGTALIKKYPKLESEFVYGDYKVYDVRKMIAKSEQEIGKATAKYFFYSNIMNFFKTEITLANGEIRKRPLIETNGETGEIVWDKGRDFATVRKVLSMPQVNIVKKTEVQTGGFSKESIRPKRNSDKLIARKKDWDPKKYGGFVSPTVAYSVLVVAKVEKGKSKKLKSVKELLGITIMERSSFEKNPIDFLEAKGYKEVKKDLIIKLPKYSLFELENGRKRMLASARFLQKGNELALPSKYVNFLYLASHYEKLKGSPEDNEQKQLFVEQHKHYLDEIIEQISEFSKRVILADANLDKVLSAYNKHRDKPIREQAENIIHLFTLTNLGAPRAFKYFDTTIDRKVYRSTKEVLDATLIHQSITGLYETRIDLSQLGGDSGGSKRTADGSEFEPKKKRKV

SEQ ID NO: 387 - protein, 1803 aa, Artificial Sequence
  Synthetic
MKRTADGSEFESPKKKRKVSEVEFSHEYWMRHALTLAKRAWDEREVPVGAVLVHNNRVIGEGWNRPIGRHDPTAHAEIMALRQGGLVMQNYRLIDATLYVTLEPCVMCAGAMIHSRIGRVVFGARDAKTGAAGSLMDVLHHPGMNHRVEITEGILADECAALLSDFFRMRRQEIKAQKKAQSSTDSGGSSGGSSGSETPGTSESATPESSGGSSGGSSEVEFSHEYWMRHALTLAKRARDEREVPVGAVLVLNNRVIGEGWNRAIGLHDPTAHAEIMALRQGGLVMQNYRLIDATLYVTFEPCVMCAGAMIHSRIGRVVFGVRNSKRGAAGSLMNVLNYPGMNHRVEITEGILADECAALLCDFYRMPRQVFNAQKKAQSSINSGGSSGGSSGSETPGTSESATPESSGGSSGGSDKKYSIGLAIGTNSVGWAVITDEYKVPSKKFKVLGNTDRHSIKKNLIGALLFDSGETAEATRLKRTARRRYTRRKNRICYLQEIFSNEMAKVDDSFFHRLEESFLVEEDKKHERHPIFGNIVDEVAYHEKYPTIYHLRKKLVDSTDKADLRLIYLALAHMIKFRGHFLIEGDLNPDNSDVDKLFIQLVQTYNQLFEENPINASGVDAKAILSARLSKSRRLENLIAQLPGEKKNGLFGNLIALSLGLTPNFKSNFDLAEDAKLQLSKDTYDDDLDNLLAQIGDQYADLFLAAKNLSDAILLSDILRVNTEITKAPLSASMIKRYDEHHQDLTLLKALVRQQLPEKYKEIFFDQSKNGYAGYIDGGASQEEFYKFIKPILEKMDGTEELLVKLNREDLLRKQRTFDNGSIPHQIHLGELHAILRRQEDFYPFLKDNREKIEKILTFRIPYYVGPLARGNSRFAWMTRKSEETITPWNFEEVVDKGASAQSFIERMTNFDKNLPNEKVLPKHSLLYEYFTVYNELTKVKYVTEGMRKPAFLSGEQKKAIVDLLFKTNRKVTVKQLKEDYFKKIECFDSVEISGVEDRFNASLGTYHDLLKIIKDKDFLDNEENEDILEDIVLTLTLFEDREMIEERLKTYAHLFDDKVMKQLKRRRYTGWGRLSRKLINGIRDKQSGKTILDFLKSDGFANRNFMQLIHDDSLTFKEDIQKAQVSGQGDSLHEHIANLAGSPAIKKGILQTVKVVDELVKVMGRHKPENIVIEMARENQTTQKGQKNSRERMKRIEEGIKELGSQILKEHPVENTQLQNEKLYLYYLQNGRDMYVDQELDINRLSDYDVDHIVPQSFLKDDSIDNKVLTRSDKNRGKSDNVPSEEVVKKMKNYWRQLLNAKLITQRKFDNLTKAERGGLSELDKAGFIKRQLVETRQITKHVAQILDSRMNTKYDENDKLIREVKVITLKSKLVSDFRKDFQFYKVREINNYHHAHDAYLNAVVGTALIKKYPKLESEFVYGDYKVYDVRKMIAKSEQEIGKATAKYFFYSNIMNFFKTEITLANGEIRKRPLIETNGETGEIVWDKGRDFATVRKVLSMPQVNIVKKTEVQTGGFSKESIRPKRNSDKLIARKKDWDPKKYGGFVSPTVAYSVLVVAKVEKGKSKKLKSVKELLGITIMERSSFEKNPIDFLEAKGYKEVKKDLIIKLPKYSLFELENGRKRMLASARFLQKGNELALPSKYVNFLYLASHYEKLKGSPEDNEQKQLFVEQHKHYLDEIIEQISEFSKRVILADANLDKVLSAYNKHRDKPIREQAENIIHLFTLTNLGAPRAFKYFDTTIDRKVYRSTKEVLDATLIHQSITGLYETRIDLSQLGGDSGGSKRTADGSEFEPKKKRKV

SEQ ID NO: 388 - protein, 1626 aa, Artificial Sequence
  Synthetic
MKRTADGSEFESPKKKRKVSEVEFSHEYWMRHALTLAKRARDEREVPVGAVLVLNNRVIGEGWNRAIGLHDPTAHAEIMALRQGGLVMQNYRLIDATLYVTFEPCVMCAGAMIHSRIGRVVFGVRNSKRGAAGSLMNVLNYPGMNHRVEITEGILADECAALLCDFYRMPRQVFNAQKKAQSSINSGGSSGGSSGSETPGTSESATPESSGGSSGGSEIGKATAKYFFYSNIMNFFKTEITLANGEIRKRPLIETNGETGEIVWDKGRDFATVRKVLSMPQVNIVKKTEVQTGGFSKESILPKRNSDKLIARKKDWDPKKYGGFDSPTVAYSVLVVAKVEKGKSKKLKSVKELLGITIMERSSFEKNPIDFLEAKGYKEVKKDLIIKLPKYSLFELENGRKRMLASAGELQKGNELALPSKYVNFLYLASHYEKLKGSPEDNEQKQLFVEQHKHYLDEIIEQISEFSKRVILADANLDKVLSAYNKHRDKPIREQAENIIHLFTLTNLGAPAAFKYFDTTIDRKRYTSTKEVLDATLIHQSITGLYETRIDLSQLGGDGGSGGSGGSGGSGGSGGSGGMDKKYSIGLAIGTNSVGWAVITDEYKVPSKKFKVLGNTDRHSIKKNLIGALLFDSGETAEATRLKRTARRRYTRRKNRICYLQEIFSNEMAKVDDSFFHRLEESFLVEEDKKHERHPIFGNIVDEVAYHEKYPTIYHLRKKLVDSTDKADLRLIYLALAHMIKFRGHFLIEGDLNPDNSDVDKLFIQLVQTYNQLFEENPINASGVDAKAILSARLSKSRRLENLIAQLPGEKKNGLFGNLIALSLGLTPNFKSNFDLAEDAKLQLSKDTYDDDLDNLLAQIGDQYADLFLAAKNLSDAILLSDILRVNTEITKAPLSASMIKRYDEHHQDLTLLKALVRQQLPEKYKEIFFDQSKNGYAGYIDGGASQEEFYKFIKPILEKMDGTEELLVKLNREDLLRKQRTFDNGSIPHQIHLGELHAILRRQEDFYPFLKDNREKIEKILTFRIPYYVGPLARGNSRFAWMTRKSEETITPWNFEEVVDKGASAQSFIERMTNFDKNLPNEKVLPKHSLLYEYFTVYNELTKVKYVTEGMRKPAFLSGEQKKAIVDLLFKTNRKVTVKQLKEDYFKKIECFDSVEISGVEDRFNASLGTYHDLLKIIKDKDFLDNEENEDILEDIVLTLTLFEDREMIEERLKTYAHLFDDKVMKQLKRRRYTGWGRLSRKLINGIRDKQSGKTILDFLKSDGFANRNFMQLIHDDSLTFKEDIQKAQVSGQGDSLHEHIANLAGSPAIKKGILQTVKVVDELVKVMGRHKPENIVIEMARENQTTQKGQKNSRERMKRIEEGIKELGSQILKEHPVENTQLQNEKLYLYYLQNGRDMYVDQELDINRLSDYDVDHIVPQSFLKDDSIDNKVLTRSDKNRGKSDNVPSEEVVKKMKNYWRQLLNAKLITQRKFDNLTKAERGGLSELDKAGFIKRQLVETRQITKHVAQILDSRMNTKYDENDKLIREVKVITLKSKLVSDFRKDFQFYKVREINNYHHAHDAYLNAVVGTALIKKYPKLESEFVYGDYKVYDVRKMIAKSEQSGGSKRTADGSEFEPKKKRKV

SEQ ID NO: 389 - protein, 1824 aa, Artificial Sequence
  Synthetic
MKRTADGSEFESPKKKRKVSEVEFSHEYWMRHALTLAKRAWDEREVPVGAVLVHNNRVIGEGWNRPIGRHDPTAHAEIMALRQGGLVMQNYRLIDATLYVTLEPCVMCAGAMIHSRIGRVVFGARDAKTGAAGSLMDVLHHPGMNHRVEITEGILADECAALLSDFFRMRRQEIKAQKKAQSSTDSGGSSGGSSGSETPGTSESATPESSGGSSGGSSEVEFSHEYWMRHALTLAKRARDEREVPVGAVLVLNNRVIGEGWNRAIGLHDPTAHAEIMALRQGGLVMQNYRLIDATLYVTFEPCVMCAGAMIHSRIGRVVFGVRNSKRGAAGSLMNVLNYPGMNHRVEITEGILADECAALLCDFYRMPRQVFNAQKKAQSSINSGGSSGGSSGSETPGTSESATPESSGGSSGGSEIGKATAKYFFYSNIMNFFKTEITLANGEIRKRPLIETNGETGEIVWDKGRDFATVRKVLSMPQVNIVKKTEVQTGGFSKESILPKRNSDKLIARKKDWDPKKYGGFDSPTVAYSVLVVAKVEKGKSKKLKSVKELLGITIMERSSFEKNPIDFLEAKGYKEVKKDLIIKLPKYSLFELENGRKRMLASAGELQKGNELALPSKYVNFLYLASHYEKLKGSPEDNEQKQLFVEQHKHYLDEIIEQISEFSKRVILADANLDKVLSAYNKHRDKPIREQAENIIHLFTLTNLGAPAAFKYFDTTIDRKRYTSTKEVLDATLIHQSITGLYETRIDLSQLGGDGGSGGSGGSGGSGGSGGSGGMDKKYSIGLAIGTNSVGWAVITDEYKVPSKKFKVLGNTDRHSIKKNLIGALLFDSGETAEATRLKRTARRRYTRRKNRICYLQEIFSNEMAKVDDSFFHRLEESFLVEEDKKHERHPIFGNIVDEVAYHEKYPTIYHLRKKLVDSTDKADLRLIYLALAHMIKFRGHFLIEGDLNPDNSDVDKLFIQLVQTYNQLFEENPINASGVDAKAILSARLSKSRRLENLIAQLPGEKKNGLFGNLIALSLGLTPNFKSNFDLAEDAKLQLSKDTYDDDLDNLLAQIGDQYADLFLAAKNLSDAILLSDILRVNTEITKAPLSASMIKRYDEHHQDLTLLKALVRQQLPEKYKEIFFDQSKNGYAGYIDGGASQEEFYKFIKPILEKMDGTEELLVKLNREDLLRKQRTFDNGSIPHQIHLGELHAILRRQEDFYPFLKDNREKIEKILTFRIPYYVGPLARGNSRFAWMTRKSEETITPWNFEEVVDKGASAQSFIERMTNFDKNLPNEKVLPKHSLLYEYFTVYNELTKVKYVTEGMRKPAFLSGEQKKAIVDLLFKTNRKVTVKQLKEDYFKKIECFDSVEISGVEDRFNASLGTYHDLLKIIKDKDFLDNEENEDILEDIVLTLTLFEDREMIEERLKTYAHLFDDKVMKQLKRRRYTGWGRLSRKLINGIRDKQSGKTILDFLKSDGFANRNFMQLIHDDSLTFKEDIQKAQVSGQGDSLHEHIANLAGSPAIKKGILQTVKVVDELVKVMGRHKPENIVIEMARENQTTQKGQKNSRERMKRIEEGIKELGSQILKEHPVENTQLQNEKLYLYYLQNGRDMYVDQELDINRLSDYDVDHIVPQSFLKDDSIDNKVLTRSDKNRGKSDNVPSEEVVKKMKNYWRQLLNAKLITQRKFDNLTKAERGGLSELDKAGFIKRQLVETRQITKHVAQILDSRMNTKYDENDKLIREVKVITLKSKLVSDFRKDFQFYKVREINNYHHAHDAYLNAVVGTALIKKYPKLESEFVYGDYKVYDVRKMIAKSEQSGGSKRTADGSEFEPKKKRKV

SEQ ID NO: 390 - protein, 1625 aa, Artificial Sequence
  Synthetic
MKRTADGSEFESPKKKRKVSEVEFSHEYWMRHALTLAKRARDEREVPVGAVLVLNNRVIGEGWNRAIGLHDPTAHAEIMALRQGGLVMQNYRLIDATLYVTFEPCVMCAGAMIHSRIGRVVFGVRNSKRGAAGSLMNVLNYPGMNHRVEITEGILADECAALLCDFYRMPRQVFNAQKKAQSSINSGGSSGGSSGSETPGTSESATPESSGGSSGGSNIMNFFKTEITLANGEIRKRPLIETNGETGEIVWDKGRDFATVRKVLSMPQVNIVKKTEVQTGGFSKESILPKRNSDKLIARKKDWDPKKYGGFDSPTVAYSVLVVAKVEKGKSKKLKSVKELLGITIMERSSFEKNPIDFLEAKGYKEVKKDLIIKLPKYSLFELENGRKRMLASAGELQKGNELALPSKYVNFLYLASHYEKLKGSPEDNEQKQLFVEQHKHYLDEIIEQISEFSKRVILADANLDKVLSAYNKHRDKPIREQAENIIHLFTLTNLGAPAAFKYFDTTIDRKRYTSTKEVLDATLIHQSITGLYETRIDLSQLGGDGGSGGSGGSGGSGGSGGSGGDKKYSIGLAIGTNSVGWAVITDEYKVPSKKFKVLGNTDRHSIKKNLIGALLFDSGETAEATRLKRTARRRYTRRKNRICYLQEIFSNEMAKVDDSFFHRLEESFLVEEDKKHERHPIFGNIVDEVAYHEKYPTIYHLRKKLVDSTDKADLRLIYLALAHMIKFRGHFLIEGDLNPDNSDVDKLFIQLVQTYNQLFEENPINASGVDAKAILSARLSKSRRLENLIAQLPGEKKNGLFGNLIALSLGLTPNFKSNFDLAEDAKLQLSKDTYDDDLDNLLAQIGDQYADLFLAAKNLSDAILLSDILRVNTEITKAPLSASMIKRYDEHHQDLTLLKALVRQQLPEKYKEIFFDQSKNGYAGYIDGGASQEEFYKFIKPILEKMDGTEELLVKLNREDLLRKQRTFDNGSIPHQIHLGELHAILRRQEDFYPFLKDNREKIEKILTFRIPYYVGPLARGNSRFAWMTRKSEETITPWNFEEVVDKGASAQSFIERMTNFDKNLPNEKVLPKHSLLYEYFTVYNELTKVKYVTEGMRKPAFLSGEQKKAIVDLLFKTNRKVTVKQLKEDYFKKIECFDSVEISGVEDRFNASLGTYHDLLKIIKDKDFLDNEENEDILEDIVLTLTLFEDREMIEERLKTYAHLFDDKVMKQLKRRRYTGWGRLSRKLINGIRDKQSGKTILDFLKSDGFANRNFMQLIHDDSLTFKEDIQKAQVSGQGDSLHEHIANLAGSPAIKKGILQTVKVVDELVKVMGRHKPENIVIEMARENQTTQKGQKNSRERMKRIEEGIKELGSQILKEHPVENTQLQNEKLYLYYLQNGRDMYVDQELDINRLSDYDVDHIVPQSFLKDDSIDNKVLTRSDKNRGKSDNVPSEEVVKKMKNYWRQLLNAKLITQRKFDNLTKAERGGLSELDKAGFIKRQLVETRQITKHVAQILDSRMNTKYDENDKLIREVKVITLKSKLVSDFRKDFQFYKVREINNYHHAHDAYLNAVVGTALIKKYPKLESEFVYGDYKVYDVRKMIAKSEQEIGKATAKYFFYSSGGSKRTADGSEFEPKKKRKV

SEQ ID NO: 391 - protein, 1605 aa, Artificial Sequence
  Synthetic
MKRTADGSEFESPKKKRKVSEVEFSHEYWMRHALTLAKRARDEREVPVGAVLVLNNRVIGEGWNRAIGLHDPTAHAEIMALRQGGLVMQNYRLIDATLYVTFEPCVMCAGAMIHSRIGRVVFGWRNSKRGAAGSLMNVLNYPGMNHRVEITEGILADECAALLCDFYRMPRQVFNAQKKAQSSINSGGSSGGSSGSETPGTSESATPESSGGSSGGSDKKYSIGLAIGTNSVGWAVITDEYKVPSKKFKVLGNTDRHSIKKNLIGALLFDSGETAEATRLKRTARRRYTRRKNRICYLQEIFSNEMAKVDDSFFHRLEESFLVEEDKKHERHPIFGNIVDEVAYHEKYPTIYHLRKKLVDSTDKADLRLIYLALAHMIKFRGHFLIEGDLNPDNSDVDKLFIQLVQTYNQLFEENPINASGVDAKAILSARLSKSRRLENLIAQLPGEKKNGLFGNLIALSLGLTPNFKSNFDLAEDAKLQLSKDTYDDDLDNLLAQIGDQYADLFLAAKNLSDAILLSDILRVNTEITKAPLSASMIKRYDEHHQDLTLLKALVRQQLPEKYKEIFFDQSKNGYAGYIDGGASQEEFYKFIKPILEKMDGTEELLVKLNREDLLRKQRTFDNGSIPHQIHLGELHAILRRQEDFYPFLKDNREKIEKILTFRIPYYVGPLARGNSRFAWMTRKSEETITPWNFEEVVDKGASAQSFIERMTNFDKNLPNEKVLPKHSLLYEYFTVYNELTKVKYVTEGMRKPAFLSGEQKKAIVDLLFKTNRKVTVKQLKEDYFKKIECFDSVEISGVEDRFNASLGTYHDLLKIIKDKDFLDNEENEDILEDIVLTLTLFEDREMIEERLKTYAHLFDDKVMKQLKRRRYTGWGRLSRKLINGIRDKQSGKTILDFLKSDGFANRNFMQLIHDDSLTFKEDIQKAQVSGQGDSLHEHIANLAGSPAIKKGILQTVKVVDELVKVMGRHKPENIVIEMARENQTTQKGQKNSRERMKRIEEGIKELGSQILKEHPVENTQLQNEKLYLYYLQNGRDMYVDQELDINRLSDYDVDHIVPQSFLKDDSIDNKVLTRSDKNRGKSDNVPSEEVVKKMKNYWRQLLNAKLITQRKFDNLTKAERGGLSELDKAGFIKRQLVETRQITKHVAQILDSRMNTKYDENDKLIREVKVITLKSKLVSDFRKDFQFYKVREINNYHHAHDAYLNAVVGTALIKKYPKLESEFVYGDYKVYDVRKMIAKSEQEIGKATAKYFFYSNIMNFFKTEITLANGEIRKRPLIETNGETGEIVWDKGRDFATVRKVLSMPQVNIVKKTEVQTGGFSKESILPKRNSDKLIARKKDWDPKKYGGFDSPTVAYSVLVVAKVEKGKSKKLKSVKELLGITIMERSSFEKNPIDFLEAKGYKEVKKDLIIKLPKYSLFELENGRKRMLASAGELQKGNELALPSKYVNFLYLASHYEKLKGSPEDNEQKQLFVEQHKHYLDEIIEQISEFSKRVILADANLDKVLSAYNKHRDKPIREQAENIIHLFTLTNLGAPAAFKYFDTTIDRKRYTSTKEVLDATLIHQSITGLYETRIDLSQLGGDSGGSKRTADGSEFEPKKKRKV

SEQ ID NO: 392 - protein, 1803 aa, Artificial Sequence
  Synthetic
MKRTADGSEFESPKKKRKVSEVEFSHEYWMRHALTLAKRAWDEREVPVGAVLVHNNRVIGEGWNRPIGRHDPTAHAEIMALRQGGLVMQNYRLIDATLYVTLEPCVMCAGAMIHSRIGRVVFGARDAKTGAAGSLMDVLHHPGMNHRVEITEGILADECAALLSDFFRMRRQEIKAQKKAQSSTDSGGSSGGSSGSETPGTSESATPESSGGSSGGSSEVEFSHEYWMRHALTLAKRARDEREVPVGAVLVLNNRVIGEGWNRAIGLHDPTAHAEIMALRQGGLVMQNYRLIDATLYVTFEPCVMCAGAMIHSRIGRVVFGVRNSKRGAAGSLMNVLNYPGMNHRVEITEGILADECAALLCDFYRMPRQVFNAQKKAQSSINSGGSSGGSSGSETPGTSESATPESSGGSSGGSDKKYSIGLAIGTNSVGWAVITDEYKVPSKKFKVLGNTDRHSIKKNLIGALLFDSGETAEATRLKRTARRRYTRRKNRICYLQEIFSNEMAKVDDSFFHRLEESFLVEEDKKHERHPIFGNIVDEVAYHEKYPTIYHLRKKLVDSTDKADLRLIYLALAHMIKFRGHFLIEGDLNPDNSDVDKLFIQLVQTYNQLFEENPINASGVDAKAILSARLSKSRRLENLIAQLPGEKKNGLFGNLIALSLGLTPNFKSNFDLAEDAKLQLSKDTYDDDLDNLLAQIGDQYADLFLAAKNLSDAILLSDILRVNTEITKAPLSASMVKRYDEHHQDLTLLKALVRQQLPEKYKEIFFDQSKNGYAGYIDGGASQEEFYKFIKPILEKMDGTEELLVKLNREDLLRKQRTFDNGIIPHQIHLGELHAILRRQGDFYPFLKDNREKIEKILTFRIPYYVGPLARGNSRFAWMTRKSEETITPWNFEEVVDKGASAQSFIERMTNFDKNLPNEKVLPKHSLLYEYFTVYNELTKVKYVTEGMRKPAFLSGEQKKAIVDLLFKTNRKVTVKQLKEDYFKKIECFDSVEISGVEDRFNASLGTYHDLLKIIKDKDFLDNEENEDILEDIVLTLTLFEDREMIEERLKTYAHLFDDKVMKQLKRLRYTGWGRLSRKLINGIRDKQSGKTILDFLKSDGFANRNFMQLIHDDSLTFKEDIQKAQVSCQGDSLHEHIANLAGSPAIKKGILQTVKVVDELIKVMGGHKPENIVIEMARENQTTQKGQKNSRERMKRIEEGIKELGSQILKEHPVENTQLQNEKLYLYYLQNGRDMYVDQELDINRLSDYDVDHIVPQSFLKDDSIENKVLTRSDKNRGKSDNVPSEEVVKKMKNYWRQLLNAKLITQRKFDNLTKAERGGLSELDKAGFIKRQLAETRQITKHVAQILDSRMNTKYDENDKLIREVKVITLKSKLVSDFRKDFQFYKVREINNYHHAHDAYLNAVVGTALIKKYPKLESEFVYGDYKVYDVRKMIAKSEQEIGKATAKYFFYSNIMNFFKTEITLANGEIRKRPLIETNGETGEIVWDKGRDFATVRKVLSMPQVNIVKKTEVQTGGFSKESILPKGNSDKLIARKKDWDPKKYGGFNSPTVAYSVLVVAKVEKGKSKKLKSVKELLGITIMERSSFEKNPIGFLEAKGYKEVKKDLIIKLPKYSLFELENGRKRMLASASVLHKGNELALPSKYVNFLYLASHYEKLKGSSEDNKQKQLFVEQHKHYLDEIIEQISEFSKRVILADANLDKVLSAYNKHRDKPIREQAENIIHLFTLTNLGASAAFKYFDTTIGRKLYTSTKEVLDATLIHQSITGLYETRIDLSQLGGDSGGSKRTADGSEFEPKKKRKV

SEQ ID NO: 393 - protein, 1605 aa, Artificial Sequence
  Synthetic
MKRTADGSEFESPKKKRKVSEVEFSHEYWMRHALTLAKRARDEREVPVGAVLVLNNRVIGEGWNRAIGLHDPTAHAEIMALRQGGLVMQNYRLIDATLYVTFEPCVMCAGAMIHSRIGRVVFGVRNSKRGAAGSLMNVLNYPGMNHRVEITEGILADECAALLCDFYRMPRQVFNAQKKAQSSINSGGSSGGSSGSETPGTSESATPESSGGSSGGSDKKYSIGLAIGTNSVGWAVITDEYKVPSKKFKVLGNTDRHSIKKNLIGALLFDSGETAEATRLKRTARRRYTRRKNRICYLQEIFSNEMAKVDDSFFHRLEESFLVEEDKKHERHPIFGNIVDEVAYHEKYPTIYHLRKKLVDSTDKADLRLIYLALAHMIKFRGHFLIEGDLNPDNSDVDKLFIQLVQTYNQLFEENPINASGVDAKAILSARLSKSRRLENLIAQLPGEKKNGLFGNLIALSLGLTPNFKSNFDLAEDAKLQLSKDTYDDDLDNLLAQIGDQYADLFLAAKNLSDAILLSDILRVNTEITKAPLSASMVKRYDEHHQDLTLLKALVRQQLPEKYKEIFFDQSKNGYAGYIDGGASQEEFYKFIKPILEKMDGTEELLVKLNREDLLRKQRTFDNGIIPHQIHLGELHAILRRQGDFYPFLKDNREKIEKILTFRIPYYVGPLARGNSRFAWMTRKSEETITPWNFEEVVDKGASAQSFIERMTNFDKNLPNEKVLPKHSLLYEYFTVYNELTKVKYVTEGMRKPAFLSGEQKKAIVDLLFKTNRKVTVKQLKEDYFKKIECFDSVEISGVEDRFNASLGTYHDLLKIIKDKDFLDNEENEDILEDIVLTLTLFEDREMIEERLKTYAHLFDDKVMKQLKRLRYTGWGRLSRKLINGIRDKQSGKTILDFLKSDGFANRNFMQLIHDDSLTFKEDIQKAQVSCQGDSLHEHIANLAGSPAIKKGILQTVKVVDELIKVMGGHKPENIVIEMARENQTTQKGQKNSRERMKRIEEGIKELGSQILKEHPVENTQLQNEKLYLYYLQNGRDMYVDQELDINRLSDYDVDHIVPQSFLKDDSIENKVLTRSDKNRGKSDNVPSEEVVKKMKNYWRQLLNAKLITQRKFDNLTKAERGGLSELDKAGFIKRQLAETRQITKHVAQILDSRMNTKYDENDKLIREVKVITLKSKLVSDFRKDFQFYKVREINNYHHAHDAYLNAVVGTALIKKYPKLESEFVYGDYKVYDVRKMIAKSEQEIGKATAKYFFYSNIMNFFKTEITLANGEIRKRPLIETNGETGEIVWDKGRDFATVRKVLSMPQVNIVKKTEVQTGGFSKESILPKGNSDKLIARKKDWDPKKYGGFNSPTVAYSVLVVAKVEKGKSKKLKSVKELLGITIMERSSFEKNPIGFLEAKGYKEVKKDLIIKLPKYSLFELENGRKRMLASASVLHKGNELALPSKYVNFLYLASHYEKLKGSSEDNKQKQLFVEQHKHYLDEIIEQISEFSKRVILADANLDKVLSAYNKHRDKPIREQAENIIHLFTLTNLGASAAFKYFDTTIGRKLYTSTKEVLDATLIHQSITGLYETRIDLSQLGGDSGGSKRTADGSEFEPKKKRKV

SEQ ID NO: 394 - protein, 1795 aa, Artificial Sequence
  Synthetic
MKRTADGSEFESPKKKRKVSEVEFSHEYWMRHALTLAKRAWDEREVPVGAVLVHNNRVIGEGWNRPIGRHDPTAHAEIMALRQGGLVMQNYRLIDATLYVTLEPCVMCAGAMIHSRIGRVVFGARDAKTGAAGSLMDVLHHPGMNHRVEITEGILADECAALLSDFFRMRRQEIKAQKKAQSSTDSGGSSGGSSGSETPGTSESATPESSGGSSGGSSEVEFSHEYWMRHALTLAKRARDEREVPVGAVLVLNNRVIGEGWNRAIGLHDPTAHAEIMALRQGGLVMQNYRLIDATLYVTFEPCVMCAGAMIHSRIGRVVFGVRNSKRGAAGSLMNVLNYPGMNHRVEITEGILADECAALLCDFYRMPRQVFNAQKKAQSSINSGGSSGGSSGSETPGTSESATPESSGGSSGGSDKKYSIGLAIGTNSVGWAVITDEYKVPSKKFKVLGNTDRHSIKKNLIGALLFDSGETAEATRLKRTARRRYTRRKNRICYLQEIFSNEMAKVDDSFFHRLEESFLVEEDKKHERHPIFGNIVDEVAYHEKYPTIYHLRKKLVDSTDKADLRLIYLALAHMIKFRGHFLIEGDLNPDNSDVDKLFIQLVQTYNQLFEENPINASGVDAKAILSARLSKSRRLENLIAQLPGEKKNGLFGNLIALSLGLTPNFKSNFDLAEDAKLQLSKDTYDDDLDNLLAQIGDQYADLFLAAKNLSDAILLSDILRVNTEITKAPLSASMIKRYDEHHQDLTLLKALVRQQLPEKYKEIFFDQSKNGYAGYIDGGASQEEFYKFIKPILEKMDGTEELLVKLNREDLLRKQRTFDNGSIPHQIHLGELHAILRRQEDFYPFLKDNREKIEKILTFRIPYYVGPLARGNSRFAWMTRKSEETITPWNFEEVVDKGASAQSFIERMTNFDKNLPNEKVLPKHSLLYEYFTVYNELTKVKYVTEGMRKPAFLSGEQKKAIVDLLFKTNRKVTVKQLKEDYFKKIECFDSVEISGVEDRFNASLGTYHDLLKIIKDKDFLDNEENEDILEDIVLTLTLFEDREMIEERLKTYAHLFDDKVMKQLKRRRYTGWGRLSRKLINGIRDKQSGKTILDFLKSDGFANRNFMQLIHDDSLTFKEDIQKAQVSGQGDSLHEHIANLAGSPAIKKGILQTVKVVDELVKVMGRHKPENIVIEMARENQTTQKGQKNSRERMKRIEEGIKELGSQILKEHPVENTQLQNEKLYLYYLQNGRDMYVDQELDINRLSDYDVDHIVPQSFLKDDSIDNKVLTRSDKNRGKSDNVPSEEVVKKMKNYWRQLLNAKLITQRKFDNLTKAERGGLSELDKAGFIKRQLVETRQITKHVAQILDSRMNTKYDENDKLIREVKVITLKSKLVSDFRKDFQFYKVREINNYHHAHDAYLNAVVGTALIKKYPKLESEFVYGDYKVYDVRKMIAKSEQEIGKATAKYFFYSNIMNFFKTEITLANGEIRKRPLIETNGETGEIVWDKGRDFATVRKVLSMPQVNIVKKTEIQTVGQNGGLFDDNPKSPLEVTPSKLVPLKKELNPKKYGGYQKPTTAYPVLLITDTKQLIPISVMNKKQFEQNPVKFLRDRGYQQVGKNDFIKLPKYTLVDIGDGIKRLWASSKEIHKGNQLVVSKKSQILLYHAHHLDSDLSNDYLQNHNQQFDVLFNEIISFSKKCKLGKEHIQKIENVYSNKKNSASIEELAESFIKLLGFTQLGATSPFNFLGVKLNQKQYKGKKDYILPCTEGTLIRQSITGLYETRVDLSKIGEDSGGSKRTADGSEFEPKKKRKV

SEQ ID NO: 395 - protein, 1597 aa, Artificial Sequence
  Synthetic
MKRTADGSEFESPKKKRKVSEVEFSHEYWMRHALTLAKRARDEREVPVGAVLVLNNRVIGEGWNRAIGLHDPTAHAEIMALRQGGLVMQNYRLIDATLYVTFEPCVMCAGAMIHSRIGRVVFGVRNSKRGAAGSLMNVLNYPGMNHRVEITEGILADECAALLCDFYRMPRQVFNAQKKAQSSINSGGSSGGSSGSETPGTSESATPESSGGSSGGSDKKYSIGLAIGTNSVGWAVITDEYKVPSKKFKVLGNTDRHSIKKNLIGALLFDSGETAEATRLKRTARRRYTRRKNRICYLQEIFSNEMAKVDDSFFHRLEESFLVEEDKKHERHPIFGNIVDEVAYHEKYPTIYHLRKKLVDSTDKADLRLIYLALAHMIKFRGHFLIEGDLNPDNSDVDKLFIQLVQTYNQLFEENPINASGVDAKAILSARLSKSRRLENLIAQLPGEKKNGLFGNLIALSLGLTPNFKSNFDLAEDAKLQLSKDTYDDDLDNLLAQIGDQYADLFLAAKNLSDAILLSDILRVNTEITKAPLSASMIKRYDEHHQDLTLLKALVRQQLPEKYKEIFFDQSKNGYAGYIDGGASQEEFYKFIKPILEKMDGTEELLVKLNREDLLRKQRTFDNGSIPHQIHLGELHAILRRQEDFYPFLKDNREKIEKILTFRIPYYVGPLARGNSRFAWMTRKSEETITPWNFEEVVDKGASAQSFIERMTNFDKNLPNEKVLPKHSLLYEYFTVYNELTKVKYVTEGMRKPAFLSGEQKKAIVDLLFKTNRKVTVKQLKEDYFKKIECFDSVEISGVEDRFNASLGTYHDLLKIIKDKDFLDNEENEDILEDIVLTLTLFEDREMIEERLKTYAHLFDDKVMKQLKRRRYTGWGRLSRKLINGIRDKQSGKTILDFLKSDGFANRNFMQLIHDDSLTFKEDIQKAQVSGQGDSLHEHIANLAGSPAIKKGILQTVKVVDELVKVMGRHKPENIVIEMARENQTTQKGQKNSRERMKRIEEGIKELGSQILKEHPVENTQLQNEKLYLYYLQNGRDMYVDQELDINRLSDYDVDHIVPQSFLKDDSIDNKVLTRSDKNRGKSDNVPSEEVVKKMKNYWRQLLNAKLITQRKFDNLTKAERGGLSELDKAGFIKRQLVETRQITKHVAQILDSRMNTKYDENDKLIREVKVITLKSKLVSDFRKDFQFYKVREINNYHHAHDAYLNAVVGTALIKKYPKLESEFVYGDYKVYDVRKMIAKSEQEIGKATAKYFFYSNIMNFFKTEITLANGEIRKRPLIETNGETGEIVWDKGRDFATVRKVLSMPQVNIVKKTEIQTVGQNGGLFDDNPKSPLEVTPSKLVPLKKELNPKKYGGYQKPTTAYPVLLITDTKQLIPISVMNKKQFEQNPVKFLRDRGYQQVGKNDFIKLPKYTLVDIGDGIKRLWASSKEIHKGNQLVVSKKSQILLYHAHHLDSDLSNDYLQNHNQQFDVLFNEIISFSKKCKLGKEHIQKIENVYSNKKNSASIEELAESFIKLLGFTQLGATSPFNFLGVKLNQKQYKGKKDYILPCTEGTLIRQSITGLYETRVDLSKIGEDSGGSKRTADGSEFEPKKKRKV

SEQ ID NO: 396 - protein, 1823 aa, Artificial Sequence
  Synthetic
MKRTADGSEFESPKKKRKVSEVEFSHEYWMRHALTLAKRAWDEREVPVGAVLVHNNRVIGEGWNRPIGRHDPTAHAEIMALRQGGLVMQNYRLIDATLYVTLEPCVMCAGAMIHSRIGRVVFGARDAKTGAAGSLMDVLHHPGMNHRVEITEGILADECAALLSDFFRMRRQEIKAQKKAQSSTDSGGSSGGSSGSETPGTSESATPESSGGSSGGSSEVEFSHEYWMRHALTLAKRARDEREVPVGAVLVLNNRVIGEGWNRAIGLHDPTAHAEIMALRQGGLVMQNYRLIDATLYVTFEPCVMCAGAMIHSRIGRVVFGVRNSKRGAAGSLMNVLNYPGMNHRVEITEGILADECAALLCDFYRMPRQVFNAQKKAQSSINSGGSSGGSSGSETPGTSESATPESSGGSSGGSNIMNFFKTEITLANGEIRKRPLIETNGETGEIVWDKGRDFATVRKVLSMPQVNIVKKTEVQTGGFSKESIRPKRNSDKLIARKKDWDPKKYGGFVSPTVAYSVLVVAKVEKGKSKKLKSVKELLGITIMERSSFEKNPIDFLEAKGYKEVKKDLIIKLPKYSLFELENGRKRMLASARFLQKGNELALPSKYVNFLYLASHYEKLKGSPEDNEQKQLFVEQHKHYLDEIIEQISEFSKRVILADANLDKVLSAYNKHRDKPIREQAENIIHLFTLTNLGAPRAFKYFDTTIDRKVYRSTKEVLDATLIHQSITGLYETRIDLSQLGGDGGSGGSGGSGGSGGSGGSGGDKKYSIGLAIGTNSVGWAVITDEYKVPSKKFKVLGNTDRHSIKKNLIGALLFDSGETAEATRLKRTARRRYTRRKNRICYLQEIFSNEMAKVDDSFFHRLEESFLVEEDKKHERHPIFGNIVDEVAYHEKYPTIYHLRKKLVDSTDKADLRLIYLALAHMIKFRGHFLIEGDLNPDNSDVDKLFIQLVQTYNQLFEENPINASGVDAKAILSARLSKSRRLENLIAQLPGEKKNGLFGNLIALSLGLTPNFKSNFDLAEDAKLQLSKDTYDDDLDNLLAQIGDQYADLFLAAKNLSDAILLSDILRVNTEITKAPLSASMIKRYDEHHQDLTLLKALVRQQLPEKYKEIFFDQSKNGYAGYIDGGASQEEFYKFIKPILEKMDGTEELLVKLNREDLLRKQRTFDNGSIPHQIHLGELHAILRRQEDFYPFLKDNREKIEKILTFRIPYYVGPLARGNSRFAWMTRKSEETITPWNFEEVVDKGASAQSFIERMTNFDKNLPNEKVLPKHSLLYEYFTVYNELTKVKYVTEGMRKPAFLSGEQKKAIVDLLFKTNRKVTVKQLKEDYFKKIECFDSVEISGVEDRFNASLGTYHDLLKIIKDKDFLDNEENEDILEDIVLTLTLFEDREMIEERLKTYAHLFDDKVMKQLKRRRYTGWGRLSRKLINGIRDKQSGKTILDFLKSDGFANRNFMQLIHDDSLTFKEDIQKAQVSGQGDSLHEHIANLAGSPAIKKGILQTVKVVDELVKVMGRHKPENIVIEMARENQTTQKGQKNSRERMKRIEEGIKELGSQILKEHPVENTQLQNEKLYLYYLQNGRDMYVDQELDINRLSDYDVDHIVPQSFLKDDSIDNKVLTRSDKNRGKSDNVPSEEVVKKMKNYWRQLLNAKLITQRKFDNLTKAERGGLSELDKAGFIKRQLVETRQITKHVAQILDSRMNTKYDENDKLIREVKVITLKSKLVSDFRKDFQFYKVREINNYHHAHDAYLNAVVGTALIKKYPKLESEFVYGDYKVYDVRKMIAKSEQEIGKATAKYFFYSSGGSKRTADGSEFEPKKKRKV

SEQ ID NO: 397 - protein, 1625 aa, Artificial Sequence
  Synthetic
MKRTADGSEFESPKKKRKVSEVEFSHEYWMRHALTLAKRARDEREVPVGAVLVLNNRVIGEGWNRAIGLHDPTAHAEIMALRQGGLVMQNYRLIDATLYVTFEPCVMCAGAMIHSRIGRVVFGVRNSKRGAAGSLMNVLNYPGMNHRVEITEGILADECAALLCDFYRMPRQVFNAQKKAQSSINSGGSSGGSSGSETPGTSESATPESSGGSSGGSNIMNFFKTEITLANGEIRKRPLIETNGETGEIVWDKGRDFATVRKVLSMPQVNIVKKTEVQTGGFSKESIRPKRNSDKLIARKKDWDPKKYGGFVSPTVAYSVLVVAKVEKGKSKKLKSVKELLGITIMERSSFEKNPIDFLEAKGYKEVKKDLIIKLPKYSLFELENGRKRMLASARFLQKGNELALPSKYVNFLYLASHYEKLKGSPEDNEQKQLFVEQHKHYLDEIIEQISEFSKRVILADANLDKVLSAYNKHRDKPIREQAENIIHLFTLTNLGAPRAFKYFDTTIDRKVYRSTKEVLDATLIHQSITGLYETRIDLSQLGGDGGSGGSGGSGGSGGSGGSGGDKKYSIGLAIGTNSVGWAVITDEYKVPSKKFKVLGNTDRHSIKKNLIGALLFDSGETAEATRLKRTARRRYTRRKNRICYLQEIFSNEMAKVDDSFFHRLEESFLVEEDKKHERHPIFGNIVDEVAYHEKYPTIYHLRKKLVDSTDKADLRLIYLALAHMIKFRGHFLIEGDLNPDNSDVDKLFIQLVQTYNQLFEENPINASGVDAKAILSARLSKSRRLENLIAQLPGEKKNGLFGNLIALSLGLTPNFKSNFDLAEDAKLQLSKDTYDDDLDNLLAQIGDQYADLFLAAKNLSDAILLSDILRVNTEITKAPLSASMIKRYDEHHQDLTLLKALVRQQLPEKYKEIFFDQSKNGYAGYIDGGASQEEFYKFIKPILEKMDGTEELLVKLNREDLLRKQRTFDNGSIPHQIHLGELHAILRRQEDFYPFLKDNREKIEKILTFRIPYYVGPLARGNSRFAWMTRKSEETITPWNFEEVVDKGASAQSFIERMTNFDKNLPNEKVLPKHSLLYEYFTVYNELTKVKYVTEGMRKPAFLSGEQKKAIVDLLFKTNRKVTVKQLKEDYFKKIECFDSVEISGVEDRFNASLGTYHDLLKIIKDKDFLDNEENEDILEDIVLTLTLFEDREMIEERLKTYAHLFDDKVMKQLKRRRYTGWGRLSRKLINGIRDKQSGKTILDFLKSDGFANRNFMQLIHDDSLTFKEDIQKAQVSGQGDSLHEHIANLAGSPAIKKGILQTVKVVDELVKVMGRHKPENIVIEMARENQTTQKGQKNSRERMKRIEEGIKELGSQILKEHPVENTQLQNEKLYLYYLQNGRDMYVDQELDINRLSDYDVDHIVPQSFLKDDSIDNKVLTRSDKNRGKSDNVPSEEVVKKMKNYWRQLLNAKLITQRKFDNLTKAERGGLSELDKAGFIKRQLVETRQITKHVAQILDSRMNTKYDENDKLIREVKVITLKSKLVSDFRKDFQFYKVREINNYHHAHDAYLNAVVGTALIKKYPKLESEFVYGDYKVYDVRKMIAKSEQEIGKATAKYFFYSSGGSKRTADGSEFEPKKKRKV

SEQ ID NO: 398 - protein, 1803 aa, Artificial Sequence
  Synthetic
MKRTADGSEFESPKKKRKVSEVEFSHEYWMRHALTLAKRAWDEREVPVGAVLVHNNRVIGEGWNRPIGRHDPTAHAEIMALRQGGLVMQNYRLIDATLYVTLEPCVMCAGAMIHSRIGRVVFGARDAKTGAAGSLMDVLHHPGMNHRVEITEGILADECAALLSDFFRMRRQEIKAQKKAQSSTDSGGSSGGSSGSETPGTSESATPESSGGSSGGSSEVEFSHEYWMRHALTLAKRARDEREVPVGAVLVLNNRVIGEGWNRAIGLHDPTAHAEIMALRQGGLVMQNYRLIDATLYVTFEPCVMCAGAMIHSRIGRVVFGVRNSKRGAAGSLMNVLNYPGMNHRVEITEGILADECAALLCDFYRMPRQVFNAQKKAQSSINSGGSSGGSSGSETPGTSESATPESSGGSSGGSDKKYSIGLAIGTNSVGWAVITDEYKVPSKKFKVLGNTDRHSIKKNLIGALLFDSGETAEATRLKRTARRRYTRRKNRICYLQEIFSNEMAKVDDSFFHRLEESFLVEEDKKHERHPIFGNIVDEVAYHEKYPTIYHLRKKLVDSTDKADLRLIYLALAHMIKFRGHFLIEGDLNPDNSDVDKLFIQLVQTYNQLFEENPINASGVDAKAILSARLSKSRRLENLIAQLPGEKKNGLFGNLIALSLGLTPNFKSNFDLAEDAKLQLSKDTYDDDLDNLLAQIGDQYADLFLAAKNLSDAILLSDILRVNTEITKAPLSASMVKRYDEHHQDLTLLKALVRQQLPEKYKEIFFDQSKNGYAGYIDGGASQEEFYKFIKPILEKMDGTEELLVKLNREDLLRKQRTFDNGIIPHQIHLGELHAILRRQGDFYPFLKDNREKIEKILTFRIPYYVGPLARGNSRFAWMTRKSEETITPWNFEEVVDKGASAQSFIERMTNFDKNLPNEKVLPKHSLLYEYFTVYNELTKVKYVTEGMRKPAFLSGEQKKAIVDLLFKTNRKVTVKQLKEDYFKKIECFDSVEISGVEDRFNASLGTYHDLLKIIKDKDFLDNEENEDILEDIVLTLTLFEDREMIEERLKTYAHLFDDKVMKQLKRLRYTGWGRLSRKLINGIRDKQSGKTILDFLKSDGFANRNFMQLIHDDSLTFKEDIQKAQVSCQGDSLHEHIANLAGSPAIKKGILQTVKVVDELIKVMGGHKPENIVIEMARENQTTQKGQKNSRERMKRIEEGIKELGSQILKEHPVENTQLQNEKLYLYYLQNGRDMYVDQELDINRLSDYDVDHIVPQSFLKDDSIENKVLTRSDKNRGKSDNVPSEEVVKKMKNYWRQLLNAKLITQRKFDNLTKAERGGLSELDKAGFIKRQLAETRQITKHVAQILDSRMNTKYDENDKLIREVKVITLKSKLVSDFRKDFQFYKVREINNYHHAHDAYLNAVVGTALIKKYPKLESEFVYGDYKVYDVRKMIAKSEQEIGKATAKYFFYSNIMNFFKTEITLANGEIRKRPLIETNGETGEIVWDKGRDFATVRKVLSMPQVNIVKKTEVQTGGFSKESILPKGNSDKLIARKKDWDPKKYGGFNSPTVAYSVLVVAKVEKGKSKKLKSVKELLGITIMERSSFEKNPIDFLEAKGYKEVKKDLIIKLPKYSLFELENGRKRMLASAGVLQKGNELALPSKYVNFLYLASHYEKLKGSPEDNEQKQLFVEQHKHYLDEIIEQISEFSKRVILADANLDKVLSAYNKHRDKPIREQAENIIHLFTLTNLGAPAAFKYFDTTINRKQYNTTKEVLDATLIRQSITGLYETRIDLSQLGGDSGGSKRTADGSEFEPKKKRKV

SEQ ID NO: 399 - protein, 1605 aa, Artificial Sequence
  Synthetic
MKRTADGSEFESPKKKRKVSEVEFSHEYWMRHALTLAKRARDEREVPVGAVLVLNNRVIGEGWNRAIGLHDPTAHAEIMALRQGGLVMQNYRLIDATLYVTFEPCVMCAGAMIHSRIGRVVFGVRNSKRGAAGSLMNVLNYPGMNHRVEITEGILADECAALLCDFYRMPRQVFNAQKKAQSSINSGGSSGGSSGSETPGTSESATPESSGGSSGGSDKKYSIGLAIGTNSVGWAVITDEYKVPSKKFKVLGNTDRHSIKKNLIGALLFDSGETAEATRLKRTARRRYTRRKNRICYLQEIFSNEMAKVDDSFFHRLEESFLVEEDKKHERHPIFGNIVDEVAYHEKYPTIYHLRKKLVDSTDKADLRLIYLALAHMIKFRGHFLIEGDLNPDNSDVDKLFIQLVQTYNQLFEENPINASGVDAKAILSARLSKSRRLENLIAQLPGEKKNGLFGNLIALSLGLTPNFKSNFDLAEDAKLQLSKDTYDDDLDNLLAQIGDQYADLFLAAKNLSDAILLSDILRVNTEITKAPLSASMVKRYDEHHQDLTLLKALVRQQLPEKYKEIFFDQSKNGYAGYIDGGASQEEFYKFIKPILEKMDGTEELLVKLNREDLLRKQRTFDNGIIPHQIHLGELHAILRRQGDFYPFLKDNREKIEKILTFRIPYYVGPLARGNSRFAWMTRKSEETITPWNFEEVVDKGASAQSFIERMTNFDKNLPNEKVLPKHSLLYEYFTVYNELTKVKYVTEGMRKPAFLSGEQKKAIVDLLFKTNRKVTVKQLKEDYFKKIECFDSVEISGVEDRFNASLGTYHDLLKIIKDKDFLDNEENEDILEDIVLTLTLFEDREMIEERLKTYAHLFDDKVMKQLKRLRYTGWGRLSRKLINGIRDKQSGKTILDFLKSDGFANRNFMQLIHDDSLTFKEDIQKAQVSCQGDSLHEHIANLAGSPAIKKGILQTVKVVDELIKVMGGHKPENIVIEMARENQTTQKGQKNSRERMKRIEEGIKELGSQILKEHPVENTQLQNEKLYLYYLQNGRDMYVDQELDINRLSDYDVDHIVPQSFLKDDSIENKVLTRSDKNRGKSDNVPSEEVVKKMKNYWRQLLNAKLITQRKFDNLTKAERGGLSELDKAGFIKRQLAETRQITKHVAQILDSRMNTKYDENDKLIREVKVITLKSKLVSDFRKDFQFYKVREINNYHHAHDAYLNAVVGTALIKKYPKLESEFVYGDYKVYDVRKMIAKSEQEIGKATAKYFFYSNIMNFFKTEITLANGEIRKRPLIETNGETGEIVWDKGRDFATVRKVLSMPQVNIVKKTEVQTGGFSKESILPKGNSDKLIARKKDWDPKKYGGFNSPTVAYSVLVVAKVEKGKSKKLKSVKELLGITIMERSSFEKNPIDFLEAKGYKEVKKDLIIKLPKYSLFELENGRKRMLASAGVLQKGNELALPSKYVNFLYLASHYEKLKGSPEDNEQKQLFVEQHKHYLDEIIEQISEFSKRVILADANLDKVLSAYNKHRDKPIREQAENIIHLFTLTNLGAPAAFKYFDTTINRKQYNTTKEVLDATLIRQSITGLYETRIDLSQLGGDSGGSKRTADGSEFEPKKKRKV

SEQ ID NO: 400 - protein, 1803 aa, Artificial Sequence
  Synthetic
MKRTADGSEFESPKKKRKVSEVEFSHEYWMRHALTLAKRAWDEREVPVGAVLVHNNRVIGEGWNRPIGRHDPTAHAEIMALRQGGLVMQNYRLIDATLYVTLEPCVMCAGAMIHSRIGRVVFGARDAKTGAAGSLMDVLHHPGMNHRVEITEGILADECAALLSDFFRMRRQEIKAQKKAQSSTDSGGSSGGSSGSETPGTSESATPESSGGSSGGSSEVEFSHEYWMRHALTLAKRARDEREVPVGAVLVLNNRVIGEGWNRAIGLHDPTAHAEIMALRQGGLVMQNYRLIDATLYVTFEPCVMCAGAMIHSRIGRVVFGVRNSKRGAAGSLMNVLNYPGMNHRVEITEGILADECAALLCDFYRMPRQVFNAQKKAQSSINSGGSSGGSSGSETPGTSESATPESSGGSSGGSDKKYSIGLAIGTNSVGWAVITDEYKVPSKKFKVLGNTDRHSIKKNLIGALLFDSGETAEATRLKRTARRRYTRRKNRICYLQEIFSNEMAKVDDSFFHRLEESFLVEEDKKHERHPIFGNIVDEVAYHEKYPTIYHLRKKLVDSTDKADLRLIYLALAHMIKFRGHFLIEGDLNPDNSDVDKLFIQLVQTYNQLFEENPINASGVDAKAILSARLSKSRRLENLIAQLPGEKKNGLFGNLIALSLGLTPNFKSNFDLAEDAKLQLSKDTYDDDLDNLLAQIGDQYADLFLAAKNLSDAILLSDILRVNTEITKAPLSASMVKRYDEHHQDLTLLKALVRQQLPEKYKEIFFDQSKNGYAGYIDGGASQEEFYKFIKPILEKMDGTEELLVKLNREDLLRKQRTFDNGIIPHQIHLGELHAILRRQGDFYPFLKDNREKIEKILTFRIPYYVGPLARGNSRFAWMTRKSEETITPWNFEEVVDKGASAQSFIERMTNFDKNLPNEKVLPKHSLLYEYFTVYNELTKVKYVTEGMRKPAFLSGEQKKAIVDLLFKTNRKVTVKQLKEDYFKKIECFDSVEISGVEDRFNASLGTYHDLLKIIKDKDFLDNEENEDILEDIVLTLTLFEDREMIEERLKTYAHLFDDKVMKQLKRLRYTGWGRLSRKLINGIRDKQSGKTILDFLKSDGFANRNFMQLIHDDSLTFKEDIQKAQVSCQGDSLHEHIANLAGSPAIKKGILQTVKVVDELIKVMGGHKPENIVIEMARENQTTQKGQKNSRERMKRIEEGIKELGSQILKEHPVENTQLQNEKLYLYYLQNGRDMYVDQELDINRLSDYDVDHIVPQSFLKDDSIENKVLTRSDKNRGKSDNVPSEEVVKKMKNYWRQLLNAKLITQRKFDNLTKAERGGLSELDKAGFIKRQLAETRQITKHVAQILDSRMNTKYDENDKLIREVKVITLKSKLVSDFRKDFQFYKVREINNYHHAHDAYLNAVVGTALIKKYPKLESEFVYGDYKVYDVRKMIAKSEQEIGKATAKYFFYSNIMNFFKTEITLANGEIRKRPLIETNGETGEIVWDKGRDFATVRKVLSMPQVNIVKKTEVQTGGFSKESILPKGNSDKLIARKKDWDPKKYGGFNSPTAAYSVLVVAKVEKGKSKKLKSVKELLGITIMERSSFEKNPIGFLEAKGYKEVKKDLIIKLPKYSLFELENGRKRMLASAGVLHKGNELALPSKYVNFLYLASHYEKLKGSPEDNEQKQLFVEQHKHYLDEIIEQISEFSKRVILADANLDKVLSAYNKHRDKPIREQAENIIHLFTLTNLGVPAAFKYFDTTIDKKRYTSTKEVLDATLIHQSITGLYETRIDLSQLGGDSGGSKRTADGSEFEPKKKRKV

SEQ ID NO: 401 - protein, 1605 aa, Artificial Sequence
  Synthetic
MKRTADGSEFESPKKKRKVSEVEFSHEYWMRHALTLAKRARDEREVPVGAVLVLNNRVIGEGWNRAIGLHDPTAHAEIMALRQGGLVMQNYRLIDATLYVTFEPCVMCAGAMIHSRIGRVVFGVRNSKRGAAGSLMNVLNYPGMNHRVEITEGILADECAALLCDFYRMPRQVFNAQKKAQSSINSGGSSGGSSGSETPGTSESATPESSGGSSGGSDKKYSIGLAIGTNSVGWAVITDEYKVPSKKFKVLGNTDRHSIKKNLIGALLFDSGETAEATRLKRTARRRYTRRKNRICYLQEIFSNEMAKVDDSFFHRLEESFLVEEDKKHERHPIFGNIVDEVAYHEKYPTIYHLRKKLVDSTDKADLRLIYLALAHMIKFRGHFLIEGDLNPDNSDVDKLFIQLVQTYNQLFEENPINASGVDAKAILSARLSKSRRLENLIAQLPGEKKNGLFGNLIALSLGLTPNFKSNFDLAEDAKLQLSKDTYDDDLDNLLAQIGDQYADLFLAAKNLSDAILLSDILRVNTEITKAPLSASMVKRYDEHHQDLTLLKALVRQQLPEKYKEIFFDQSKNGYAGYIDGGASQEEFYKFIKPILEKMDGTEELLVKLNREDLLRKQRTFDNGIIPHQIHLGELHAILRRQGDFYPFLKDNREKIEKILTFRIPYYVGPLARGNSRFAWMTRKSEETITPWNFEEVVDKGASAQSFIERMTNFDKNLPNEKVLPKHSLLYEYFTVYNELTKVKYVTEGMRKPAFLSGEQKKAIVDLLFKTNRKVTVKQLKEDYFKKIECFDSVEISGVEDRFNASLGTYHDLLKIIKDKDFLDNEENEDILEDIVLTLTLFEDREMIEERLKTYAHLFDDKVMKQLKRLRYTGWGRLSRKLINGIRDKQSGKTILDFLKSDGFANRNFMQLIHDDSLTFKEDIQKAQVSCQGDSLHEHIANLAGSPAIKKGILQTVKVVDELIKVMGGHKPENIVIEMARENQTTQKGQKNSRERMKRIEEGIKELGSQILKEHPVENTQLQNEKLYLYYLQNGRDMYVDQELDINRLSDYDVDHIVPQSFLKDDSIENKVLTRSDKNRGKSDNVPSEEVVKKMKNYWRQLLNAKLITQRKFDNLTKAERGGLSELDKAGFIKRQLAETRQITKHVAQILDSRMNTKYDENDKLIREVKVITLKSKLVSDFRKDFQFYKVREINNYHHAHDAYLNAVVGTALIKKYPKLESEFVYGDYKVYDVRKMIAKSEQEIGKATAKYFFYSNIMNFFKTEITLANGEIRKRPLIETNGETGEIVWDKGRDFATVRKVLSMPQVNIVKKTEVQTGGFSKESILPKGNSDKLIARKKDWDPKKYGGFNSPTAAYSVLVVAKVEKGKSKKLKSVKELLGITIMERSSFEKNPIGFLEAKGYKEVKKDLIIKLPKYSLFELENGRKRMLASAGVLHKGNELALPSKYVNFLYLASHYEKLKGSPEDNEQKQLFVEQHKHYLDEIIEQISEFSKRVILADANLDKVLSAYNKHRDKPIREQAENIIHLFTLTNLGVPAAFKYFDTTIDKKRYTSTKEVLDATLIHQSITGLYETRIDLSQLGGDSGGSKRTADGSEFEPKKKRKV

SEQ ID NO: 402 - protein, 1489 aa, Artificial Sequence
  Synthetic
MKRTADGSEFESPKKKRKVSEVEFSHEYWMRHALTLAKRAWDEREVPVGAVLVHNNRVIGEGWNRPIGRHDPTAHAEIMALRQGGLVMQNYRLIDATLYVTLEPCVMCAGAMIHSRIGRVVFGARDAKTGAAGSLMDVLHHPGMNHRVEITEGILADECAALLSDFFRMRRQEIKAQKKAQSSTDSGGSSGGSSGSETPGTSESATPESSGGSSGGSSEVEFSHEYWMRHALTLAKRARDEREVPVGAVLVLNNRVIGEGWNRAIGLHDPTAHAEIMALRQGGLVMQNYRLIDATLYVTFEPCVMCAGAMIHSRIGRVVFGVRNSKRGAAGSLMNVLNYPGMNHRVEITEGILADECAALLCDFYRMPRQVFNAQKKAQSSINSGGSSGGSSGSETPGTSESATPESSGGSSGGSGKRNYILGLAIGITSVGYGIIDYETRDVIDAGVRLFKEANVENNEGRRSKRGARRLKRRRRHRIQRVKKLLFDYNLLTDHSELSGINPYEARVKGLSQKLSEEEFSAALLHLAKRRGVHNVNEVEEDTGNELSTKEQISRNSKALEEKYVAELQLERLKKDGEVRGSINRFKTSDYVKEAKQLLKVQKAYHQLDQSFIDTYIDLLETRRTYYEGPGEGSPFGWKDIKEWYEMLMGHCTYFPEELRSVKYAYNADLYNALNDLNNLVITRDENEKLEYYEKFQIIENVFKQKKKPTLKQIAKEILVNEEDIKGYRVTSTGKPEFTNLKVYHDIKDITARKEIIENAELLDQIAKILTIYQSSEDIQEELTNLNSELTQEEIEQISNLKGYTGTHNLSLKAINLILDELWHTNDNQIAIFNRLKLVPKKVDLSQQKEIPTTLVDDFILSPVVKRSFIQSIKVINAIIKKYGLPNDIIIELAREKNSKDAQKMINEMQKRNRQTNERIEEIIRTTGKENAKYLIEKIKLHDMQEGKCLYSLEAIPLEDLLNNPFNYEVDHIIPRSVSFDNSFNNKVLVKQEENSKKGNRTPFQYLSSSDSKISYETFKKHILNLAKGKGRISKTKKEYLLEERDINRFSVQKDFINRNLVDTRYATRGLMNLLRSYFRVNNLDVKVKSINGGFTSFLRRKWKFKKERNKGYKHHAEDALIIANADFIFKEWKKLDKAKKVMENQMFEEKQAESMPEIETEQEYKEIFITPHQIKHIKDFKDYKYSHRVDKKPNRKLINDTLYSTRKDDKGNTLIVNNLNGLYDKDNDKLKKLINKSPEKLLMYHHDPQTYQKLKLIMEQYGDEKNPLYKYYEETGNYLTKYSKKDNGPVIKKIKYYGNKLNAHLDITDDYPNSRNKVVKLSLKPYRFDVYLDNGVYKFVTVKNLDVIKKENYYEVNSKCYEEAKKLKKISNQAEFIASFYKNDLIKINGELYRVIGVNNDLLNRIEVNMIDITYREYLENMNDKRPPHIIKTIASKTQSIKKYSTDILGNLYEVKSKKHPQIIKKGSGGSKRTADGSEFEPKKKRKV

SEQ ID NO: 403 - protein, 1291 aa, Artificial Sequence
  Synthetic
MKRTADGSEFESPKKKRKVSEVEFSHEYWMRHALTLAKRARDEREVPVGAVLVLNNRVIGEGWNRAIGLHDPTAHAEIMALRQGGLVMQNYRLIDATLYVTFEPCVMCAGAMIHSRIGRVVFGVRNSKRGAAGSLMNVLNYPGMNHRVEITEGILADECAALLCDFYRMPRQVFNAQKKAQSSINSGGSSGGSSGSETPGTSESATPESSGGSSGGSGKRNYILGLAIGITSVGYGIIDYETRDVIDAGVRLFKEANVENNEGRRSKRGARRLKRRRRHRIQRVKKLLFDYNLLTDHSELSGINPYEARVKGLSQKLSEEEFSAALLHLAKRRGVHNVNEVEEDTGNELSTKEQISRNSKALEEKYVAELQLERLKKDGEVRGSINRFKTSDYVKEAKQLLKVQKAYHQLDQSFIDTYIDLLETRRTYYEGPGEGSPFGWKDIKEWYEMLMGHCTYFPEELRSVKYAYNADLYNALNDLNNLVITRDENEKLEYYEKFQIIENVFKQKKKPTLKQIAKEILVNEEDIKGYRVTSTGKPEFTNLKVYHDIKDITARKEIIENAELLDQIAKILTIYQSSEDIQEELTNLNSELTQEEIEQISNLKGYTGTHNLSLKAINLILDELWHTNDNQIAIFNRLKLVPKKVDLSQQKEIPTTLVDDFILSPVVKRSFIQSIKVINAIIKKYGLPNDIIIELAREKNSKDAQKMINEMQKRNRQTNERIEEIIRTTGKENAKYLIEKIKLHDMQEGKCLYSLEAIPLEDLLNNPFNYEVDHIIPRSVSFDNSFNNKVLVKQEENSKKGNRTPFQYLSSSDSKISYETFKKHILNLAKGKGRISKTKKEYLLEERDINRFSVQKDFINRNLVDTRYATRGLMNLLRSYFRVNNLDVKVKSINGGFTSFLRRKWKFKKERNKGYKHHAEDALIIANADFIFKEWKKLDKAKKVMENQMFEEKQAESMPEIETEQEYKEIFITPHQIKHIKDFKDYKYSHRVDKKPNRKLINDTLYSTRKDDKGNTLIVNNLNGLYDKDNDKLKKLINKSPEKLLMYHHDPQTYQKLKLIMEQYGDEKNPLYKYYEETGNYLTKYSKKDNGPVIKKIKYYGNKLNAHLDITDDYPNSRNKVVKLSLKPYRFDVYLDNGVYKFVTVKNLDVIKKENYYEVNSKCYEEAKKLKKISNQAEFIASFYKNDLIKINGELYRVIGVNNDLLNRIEVNMIDITYREYLENMNDKRPPHIIKTIASKTQSIKKYSTDILGNLYEVKSKKHPQIIKKGSGGSKRTADGSEFEPKKKRKV

SEQ ID NO: 404 - protein, 1823 aa, Artificial Sequence
  Synthetic
MKRTADGSEFESPKKKRKVSEVEFSHEYWMRHALTLAKRAWDEREVPVGAVLVHNNRVIGEGWNRPIGRHDPTAHAEIMALRQGGLVMQNYRLIDATLYVTLEPCVMCAGAMIHSRIGRVVFGARDAKTGAAGSLMDVLHHPGMNHRVEITEGILADECAALLSDFFRMRRQEIKAQKKAQSSTDSGGSSGGSSGSETPGTSESATPESSGGSSGGSSEVEFSHEYWMRHALTLAKRARDEREVPVGAVLVLNNRVIGEGWNRAIGLHDPTAHAEIMALRQGGLVMQNYRLIDATLYVTFEPCVMCAGAMIHSRIGRVVFGVRNSKRGAAGSLMNVLNYPGMNHRVEITEGILADECAALLCDFYRMPRQVFNAQKKAQSSINSGGSSGGSSGSETPGTSESATPESSGGSSGGSNIMNFFKTEITLANGEIRKRPLIETNGETGEIVWDKGRDFATVRKVLSMPQVNIVKKTEVQTGGFSKESILPKRNSDKLIARKKDWDPKKYGGFDSPTVAYSVLVVAKVEKGKSKKLKSVKELLGITIMERSSFEKNPIDFLEAKGYKEVKKDLIIKLPKYSLFELENGRKRMLASAGELQKGNELALPSKYVNFLYLASHYEKLKGSPEDNEQKQLFVEQHKHYLDEIIEQISEFSKRVILADANLDKVLSAYNKHRDKPIREQAENIIHLFTLTNLGAPAAFKYFDTTIDRKRYTSTKEVLDATLIHQSITGLYETRIDLSQLGGDGGSGGSGGSGGSGGSGGSGGDKKYSIGLAIGTNSVGWAVITDEYKVPSKKFKVLGNTDRHSIKKNLIGALLFDSGETAEATRLKRTARRRYTRRKNRICYLQEIFSNEMAKVDDSFFHRLEESFLVEEDKKHERHPIFGNIVDEVAYHEKYPTIYHLRKKLVDSTDKADLRLIYLALAHMIKFRGHFLIEGDLNPDNSDVDKLFIQLVQTYNQLFEENPINASGVDAKAILSARLSKSRRLENLIAQLPGEKKNGLFGNLIALSLGLTPNFKSNFDLAEDAKLQLSKDTYDDDLDNLLAQIGDQYADLFLAAKNLSDAILLSDILRVNTEITKAPLSASMIKRYDEHHQDLTLLKALVRQQLPEKYKEIFFDQSKNGYAGYIDGGASQEEFYKFIKPILEKMDGTEELLVKLNREDLLRKQRTFDNGSIPHQIHLGELHAILRRQEDFYPFLKDNREKIEKILTFRIPYYVGPLARGNSRFAWMTRKSEETITPWNFEEVVDKGASAQSFIERMTNFDKNLPNEKVLPKHSLLYEYFTVYNELTKVKYVTEGMRKPAFLSGEQKKAIVDLLFKTNRKVTVKQLKEDYFKKIECFDSVEISGVEDRFNASLGTYHDLLKIIKDKDFLDNEENEDILEDIVLTLTLFEDREMIEERLKTYAHLFDDKVMKQLKRRRYTGWGRLSRKLINGIRDKQSGKTILDFLKSDGFANRNFMQLIHDDSLTFKEDIQKAQVSGQGDSLHEHIANLAGSPAIKKGILQTVKVVDELVKVMGRHKPENIVIEMARENQTTQKGQKNSRERMKRIEEGIKELGSQILKEHPVENTQLQNEKLYLYYLQNGRDMYVDQELDINRLSDYDVDHIVPQSFLKDDSIDNKVLTRSDKNRGKSDNVPSEEVVKKMKNYWRQLLNAKLITQRKFDNLTKAERGGLSELDKAGFIKRQLVETRQITKHVAQILDSRMNTKYDENDKLIREVKVITLKSKLVSDFRKDFQFYKVREINNYHHAHDAYLNAVVGTALIKKYPKLESEFVYGDYKVYDVRKMIAKSEQEIGKATAKYFFYSSGGSKRTADGSEFEPKKKRKV

SEQ ID NO: 405 - protein, 1803 aa, Artificial Sequence
  Synthetic
MKRTADGSEFESPKKKRKVSEVEFSHEYWMRHALTLAKRAWDEREVPVGAVLVHNNRVIGEGWNRPIGRHDPTAHAEIMALRQGGLVMQNYRLIDATLYVTLEPCVMCAGAMIHSRIGRVVFGARDAKTGAAGSLMDVLHHPGMNHRVEITEGILADECAALLSDFFRMRRQEIKAQKKAQSSTDSGGSSGGSSGSETPGTSESATPESSGGSSGGSSEVEFSHEYWMRHALTLAKRARDEREVPVGAVLVLNNRVIGEGWNRAIGLHDPTAHAEIMALRQGGLVMQNYRLIDATLYVTFEPCVMCAGAMIHSRIGRVVFGVRNSKRGAAGSLMNVLNYPGMNHRVEITEGILADECAALLCDFYRMPRQVFNAQKKAQSSINSGGSSGGSSGSETPGTSESATPESSGGSSGGSDKKYSIGLAIGTNSVGWAVITDEYKVPSKKFKVLGNTDRHSIKKNLIGALLFDSGETAEATRLKRTARRRYTRRKNRICYLQEIFSNEMAKVDDSFFHRLEESFLVEEDKKHERHPIFGNIVDEVAYHEKYPTIYHLRKKLVDSTDKADLRLIYLALAHMIKFRGHFLIEGDLNPDNSDVDKLFIQLVQTYNQLFEENPINASGVDAKAILSARLSKSRRLENLIAQLPGEKKNGLFGNLIALSLGLTPNFKSNFDLAEDAKLQLSKDTYDDDLDNLLAQIGDQYADLFLAAKNLSDAILLSDILRVNTEITKAPLSASMIKRYDEHHQDLTLLKALVRQQLPEKYKEIFFDQSKNGYAGYIDGGASQEEFYKFIKPILEKMDGTEELLVKLNREDLLRKQRTFDNGSIPHQIHLGELHAILRRQEDFYPFLKDNREKIEKILTFRIPYYVGPLARGNSRFAWMTRKSEETITPWNFEEVVDKGASAQSFIERMTNFDKNLPNEKVLPKHSLLYEYFTVYNELTKVKYVTEGMRKPAFLSGEQKKAIVDLLFKTNRKVTVKQLKEDYFKKIECFDSVEISGVEDRFNASLGTYHDLLKIIKDKDFLDNEENEDILEDIVLTLTLFEDREMIEERLKTYAHLFDDKVMKQLKRRRYTGWGRLSRKLINGIRDKQSGKTILDFLKSDGFANRNFMQLIHDDSLTFKEDIQKAQVSGQGDSLHEHIANLAGSPAIKKGILQTVKVVDELVKVMGRHKPENIVIEMARENQTTQKGQKNSRERMKRIEEGIKELGSQILKEHPVENTQLQNEKLYLYYLQNGRDMYVDQELDINRLSDYDVDHIVPQSFLKDDSIDNKVLTRSDKNRGKSDNVPSEEVVKKMKNYWRQLLNAKLITQRKFDNLTKAERGGLSELDKAGFIKRQLVETRQITKHVAQILDSRMNTKYDENDKLIREVKVITLKSKLVSDFRKDFQFYKVREINNYHHAHDAYLNAVVGTALIKKYPKLESEFVYGDYKVYDVRKMIAKSEQEIGKATAKYFFYSNIMNFFKTEITLANGEIRKRPLIETNGETGEIVWDKGRDFATVRKVLSMPQVNIVKKTEVQTGGFSKESILPKRNSDKLIARKKDWDPKKYGGFVSPTVAYSVLVVAKVEKGKSKKLKSVKELLGITIMERSSFEKNPIDFLEAKGYKEVKKDLIIKLPKYSLFELENGRKRMLASARELQKGNELALPSKYVNFLYLASHYEKLKGSPEDNEQKQLFVEQHKHYLDEIIEQISEFSKRVILADANLDKVLSAYNKHRDKPIREQAENIIHLFTLTNLGAPAAFKYFDTTIDRKQYRSTKEVLDATLIHQSITGLYETRIDLSQLGGDSGGSKRTADGSEFEPKKKRKV

SEQ ID NO: 406 - protein, 1605 aa, Artificial Sequence
  Synthetic
MKRTADGSEFESPKKKRKVSEVEFSHEYWMRHALTLAKRARDEREVPVGAVLVLNNRVIGEGWNRAIGLHDPTAHAEIMALRQGGLVMQNYRLIDATLYVTFEPCVMCAGAMIHSRIGRVVFGVRNSKRGAAGSLMNVLNYPGMNHRVEITEGILADECAALLCDFYRMPRQVFNAQKKAQSSINSGGSSGGSSGSETPGTSESATPESSGGSSGGSDKKYSIGLAIGTNSVGWAVITDEYKVPSKKFKVLGNTDRHSIKKNLIGALLFDSGETAEATRLKRTARRRYTRRKNRICYLQEIFSNEMAKVDDSFFHRLEESFLVEEDKKHERHPIFGNIVDEVAYHEKYPTIYHLRKKLVDSTDKADLRLIYLALAHMIKFRGHFLIEGDLNPDNSDVDKLFIQLVQTYNQLFEENPINASGVDAKAILSARLSKSRRLENLIAQLPGEKKNGLFGNLIALSLGLTPNFKSNFDLAEDAKLQLSKDTYDDDLDNLLAQIGDQYADLFLAAKNLSDAILLSDILRVNTEITKAPLSASMIKRYDEHHQDLTLLKALVRQQLPEKYKEIFFDQSKNGYAGYIDGGASQEEFYKFIKPILEKMDGTEELLVKLNREDLLRKQRTFDNGSIPHQIHLGELHAILRRQEDFYPFLKDNREKIEKILTFRIPYYVGPLARGNSRFAWMTRKSEETITPWNFEEVVDKGASAQSFIERMTNFDKNLPNEKVLPKHSLLYEYFTVYNELTKVKYVTEGMRKPAFLSGEQKKAIVDLLFKTNRKVTVKQLKEDYFKKIECFDSVEISGVEDRFNASLGTYHDLLKIIKDKDFLDNEENEDILEDIVLTLTLFEDREMIEERLKTYAHLFDDKVMKQLKRRRYTGWGRLSRKLINGIRDKQSGKTILDFLKSDGFANRNFMQLIHDDSLTFKEDIQKAQVSGQGDSLHEHIANLAGSPAIKKGILQTVKVVDELVKVMGRHKPENIVIEMARENQTTQKGQKNSRERMKRIEEGIKELGSQILKEHPVENTQLQNEKLYLYYLQNGRDMYVDQELDINRLSDYDVDHIVPQSFLKDDSIDNKVLTRSDKNRGKSDNVPSEEVVKKMKNYWRQLLNAKLITQRKFDNLTKAERGGLSELDKAGFIKRQLVETRQITKHVAQILDSRMNTKYDENDKLIREVKVITLKSKLVSDFRKDFQFYKVREINNYHHAHDAYLNAVVGTALIKKYPKLESEFVYGDYKVYDVRKMIAKSEQEIGKATAKYFFYSNIMNFFKTEITLANGEIRKRPLIETNGETGEIVWDKGRDFATVRKVLSMPQVNIVKKTEVQTGGFSKESILPKRNSDKLIARKKDWDPKKYGGFVSPTVAYSVLVVAKVEKGKSKKLKSVKELLGITIMERSSFEKNPIDFLEAKGYKEVKKDLIIKLPKYSLFELENGRKRMLASARELQKGNELALPSKYVNFLYLASHYEKLKGSPEDNEQKQLFVEQHKHYLDEIIEQISEFSKRVILADANLDKVLSAYNKHRDKPIREQAENIIHLFTLTNLGAPAAFKYFDTTIDRKQYRSTKEVLDATLIHQSITGLYETRIDLSQLGGDSGGSKRTADGSEFEPKKKRKV

SEQ ID NO: 407 - protein, 1534 aa, Artificial Sequence
  Synthetic
MKRTADGSEFESPKKKRKVSEVEFSHEYWMRHALTLAKRAWDEREVPVGAVLVHNNRVIGEGWNRPIGRHDPTAHAEIMALRQGGLVMQNYRLIDATLYVTLEPCVMCAGAMIHSRIGRVVFGARDAKTGAAGSLMDVLHHPGMNHRVEITEGILADECAALLSDFFRMRRQEIKAQKKAQSSTDSGGSSGGSSGSETPGTSESATPESSGGSSGGSSEVEFSHEYWMRHALTLAKRARDEREVPVGAVLVLNNRVIGEGWNRAIGLHDPTAHAEIMALRQGGLVMQNYRLIDATLYVTFEPCVMCAGAMIHSRIGRVVFGVRNSKRGAAGSLMNVLNYPGMNHRVEITEGILADECAALLCDFYRMPRQVFNAQKKAQSSINSGGSSGGSSGSETPGTSESATPESSGGSSGGSDKKYSIGLDIGTNSVGWAVITDEYKVPSKKFKVLGNTDRHSIKKNLIGALLFDSGETAEATRLKRTARRRYTRRKNRICYLQEIFSNEMAKVDDSFFHRLEESFLVEEDKKHERHPIFGNIVDEVAYHEKYPTIYHLRKKLVDSTDKADLRLIYLALAHMIKFRGHFLIEGDLNPDNSDVDKLFIQLVQTYNQLFEENPINASGVDAKAILSARLSKSRRLENLIAQLPGEKKNGLFGNLIALSLGLTPNFKSNFDLAEDAKLQLSKDTYDDDLDNLLAQIGDQYADLFLAAKNLSDAILLSDILRVNTEITKAPLSASMIKRYDEHHQDLTLLKALVRQQLPEKYKEIFFDQSKNGYAGYIDGGASQEEFYKFIKPILEKMDGTEELLVKLNREDLLRKQRTFDNGSIPHQIHLGELHAILRRQEDFYPFLKDNREKIEKILTFRIPYYVGPLARGNSRFAWMTRKSEETITPWNFEEVVDKGASAQSFIERMTNFDKNLPNEKVLPKHSLLYEYFTVYNELTKVKYVTEGMRKPAFLSGEQKKAIVDLLFKTNRKVTVKQLKEDYFKKIECFDSVEISGVEDRFNASLGTYHDLLKIIKDKDFLDNEENEDILEDIVLTLTLFEDREMIEERLKTYAHLFDDKVMKQLKRRRYTGWGRLSRKLINGIRDKQSGKTILDFLKSDGFANRNFMQLIHDDSLTFKEDIQKAQVSGQGDSLHEHIANLAGSPAIKKGILQTVKVVDELVKVMGRHKPENIVIEMARENQTTQKGQKNSRERMKRIEEGIKELGSQILKEHPVENTQLQNEKLYLYYLQNGRDMYVDQELDINRLSDYDVDHIVPQSFLKDDSIDNKVLTRSDKNRGKSDNVPSEEVVKKMKNYWRQLLNAKLITQRKFDNLTKAERGGLSELDKAGFIKRQLVETRQITKHVAQILDSRMNTKYDENDKLIREVKVITLKSKLVSDFRKDFQFYKVREINNYHHAHDAYLNAVVGTALIKKYPKLESEFVYGDYKVYDVRKMIAKSEQEIGKATAKYFFYSNIMNFFKTEITLANGEIRKRPLIETNGETGEIVWDKGRDFATVRKVLSMPQVNIVKKTESGGSKRTADGSEFEPKKKRKV

SEQ ID NO: 408 - protein, 1336 aa, Artificial Sequence
  Synthetic
MKRTADGSEFESPKKKRKVSEVEFSHEYWMRHALTLAKRARDEREVPVGAVLVLNNRVIGEGWNRAIGLHDPTAHAEIMALRQGGLVMQNYRLIDATLYVTFEPCVMCAGAMIHSRIGRVVFGVRNSKRGAAGSLMNVLNYPGMNHRVEITEGILADECAALLCDFYRMPRQVFNAQKKAQSSINSGGSSGGSSGSETPGTSESATPESSGGSSGGSDKKYSIGLDIGTNSVGWAVITDEYKVPSKKFKVLGNTDRHSIKKNLIGALLFDSGETAEATRLKRTARRRYTRRKNRICYLQEIFSNEMAKVDDSFFHRLEESFLVEEDKKHERHPIFGNIVDEVAYHEKYPTIYHLRKKLVDSTDKADLRLIYLALAHMIKFRGHFLIEGDLNPDNSDVDKLFIQLVQTYNQLFEENPINASGVDAKAILSARLSKSRRLENLIAQLPGEKKNGLFGNLIALSLGLTPNFKSNFDLAEDAKLQLSKDTYDDDLDNLLAQIGDQYADLFLAAKNLSDAILLSDILRVNTEITKAPLSASMIKRYDEHHQDLTLLKALVRQQLPEKYKEIFFDQSKNGYAGYIDGGASQEEFYKFIKPILEKMDGTEELLVKLNREDLLRKQRTFDNGSIPHQIHLGELHAILRRQEDFYPFLKDNREKIEKILTFRIPYYVGPLARGNSRFAWMTRKSEETITPWNFEEVVDKGASAQSFIERMTNFDKNLPNEKVLPKHSLLYEYFTVYNELTKVKYVTEGMRKPAFLSGEQKKAIVDLLFKTNRKVTVKQLKEDYFKKIECFDSVEISGVEDRFNASLGTYHDLLKIIKDKDFLDNEENEDILEDIVLTLTLFEDREMIEERLKTYAHLFDDKVMKQLKRRRYTGWGRLSRKLINGIRDKQSGKTILDFLKSDGFANRNFMQLIHDDSLTFKEDIQKAQVSGQGDSLHEHIANLAGSPAIKKGILQTVKVVDELVKVMGRHKPENIVIEMARENQTTQKGQKNSRERMKRIEEGIKELGSQILKEHPVENTQLQNEKLYLYYLQNGRDMYVDQELDINRLSDYDVDHIVPQSFLKDDSIDNKVLTRSDKNRGKSDNVPSEEVVKKMKNYWRQLLNAKLITQRKFDNLTKAERGGLSELDKAGFIKRQLVETRQITKHVAQILDSRMNTKYDENDKLIREVKVITLKSKLVSDFRKDFQFYKVREINNYHHAHDAYLNAVVGTALIKKYPKLESEFVYGDYKVYDVRKMIAKSEQEIGKATAKYFFYSNIMNFFKTEITLANGEIRKRPLIETNGETGEIVWDKGRDFATVRKVLSMPQVNIVKKTESGGSKRTADGSEFEPKKKRKV

SEQ ID NO: 409 - protein, 1588 aa, Artificial Sequence
  Synthetic
MSEVEFSHEYWMRHALTLAKRARDEREVPVGAVLVLNNRVIGEGWNRAIGLHDPTAHAEIMALRQGGLVMQNYRLIDATLYVTFEPCVMCAGAMIHSRIGRVVFGVRNAKTGAAGSLMDVLHHPGMNHRVEITEGILADECAALLCRFFRMPRRVFNAQKKAQSSTDSGGSSGGSSGSETPGTSESATPESSGGSSGGSDKKYSIGLAIGTNSVGWAVITDEYKVPSKKFKVLGNTDRHSIKKNLIGALLFDSGETAEATRLKRTARRRYTRRKNRICYLQEIFSNEMAKVDDSFFHRLEESFLVEEDKKHERHPIFGNIVDEVAYHEKYPTIYHLRKKLVDSTDKADLRLIYLALAHMIKFRGHFLIEGDLNPDNSDVDKLFIQLVQTYNQLFEENPINASGVDAKAILSARLSKSRRLENLIAQLPGEKKNGLFGNLIALSLGLTPNFKSNFDLAEDAKLQLSKDTYDDDLDNLLAQIGDQYADLFLAAKNLSDAILLSDILRVNTEITKAPLSASMIKRYDEHHQDLTLLKALVRQQLPEKYKEIFFDQSKNGYAGYIDGGASQEEFYKFIKPILEKMDGTEELLVKLNREDLLRKQRTFDNGSIPHQIHLGELHAILRRQEDFYPFLKDNREKIEKILTFRIPYYVGPLARGNSRFAWMTRKSEETITPWNFEEVVDKGASAQSFIERMTNFDKNLPNEKVLPKHSLLYEYFTVYNELTKVKYVTEGMRKPAFLSGEQKKAIVDLLFKTNRKVTVKQLKEDYFKKIECFDSVEISGVEDRFNASLGTYHDLLKIIKDKDFLDNEENEDILEDIVLTLTLFEDREMIEERLKTYAHLFDDKVMKQLKRRRYTGWGRLSRKLINGIRDKQSGKTILDFLKSDGFANRNFMQLIHDDSLTFKEDIQKAQVSGQGDSLHEHIANLAGSPAIKKGILQTVKVVDELVKVMGRHKPENIVIEMARENQTTQKGQKNSRERMKRIEEGIKELGSQILKEHPVENTQLQNEKLYLYYLQNGRDMYVDQELDINRLSDYDVDHIVPQSFLKDDSIDNKVLTRSDKNRGKSDNVPSEEVVKKMKNYWRQLLNAKLITQRKFDNLTKAERGGLSELDKAGFIKRQLVETRQITKHVAQILDSRMNTKYDENDKLIREVKVITLKSKLVSDFRKDFQFYKVREINNYHHAHDAYLNAVVGTALIKKYPKLESEFVYGDYKVYDVRKMIAKSEQEIGKATAKYFFYSNIMNFFKTEITLANGEIRKRPLIETNGETGEIVWDKGRDFATVRKVLSMPQVNIVKKTEVQTGGFSKESILPKRNSDKLIARKKDWDPKKYGGFDSPTVAYSVLVVAKVEKGKSKKLKSVKELLGITIMERSSFEKNPIDFLEAKGYKEVKKDLIIKLPKYSLFELENGRKRMLASAGELQKGNELALPSKYVNFLYLASHYEKLKGSPEDNEQKQLFVEQHKHYLDEIIEQISEFSKRVILADANLDKVLSAYNKHRDKPIREQAENIIHLFTLTNLGAPAAFKYFDTTIDRKRYTSTKEVLDATLIHQSITGLYETRIDLSQLGGDEGADKRTADGSEFESPKKKRKV

SEQ ID NO: 410 - protein, 1588 aa, Artificial Sequence
  Synthetic
MSEVEFSHEYWMRHALTLAKRARDEREVPVGAVLVLNNRVIGEGWNRAIGLHDPTAHAEIMALRQGGLVMQNYRLYDATLYVTFEPCVMCAGAMIHSRIGRVVFGVRNAKTGAAGSLMDVLHHPGMNHRVEITEGILADECAALLCRFFRMPRRVFNAQKKAQSSTDSGGSSGGSSGSETPGTSESATPESSGGSSGGSDKKYSIGLAIGTNSVGWAVITDEYKVPSKKFKVLGNTDRHSIKKNLIGALLFDSGETAEATRLKRTARRRYTRRKNRICYLQEIFSNEMAKVDDSFFHRLEESFLVEEDKKHERHPIFGNIVDEVAYHEKYPTIYHLRKKLVDSTDKADLRLIYLALAHMIKFRGHFLIEGDLNPDNSDVDKLFIQLVQTYNQLFEENPINASGVDAKAILSARLSKSRRLENLIAQLPGEKKNGLFGNLIALSLGLTPNFKSNFDLAEDAKLQLSKDTYDDDLDNLLAQIGDQYADLFLAAKNLSDAILLSDILRVNTEITKAPLSASMIKRYDEHHQDLTLLKALVRQQLPEKYKEIFFDQSKNGYAGYIDGGASQEEFYKFIKPILEKMDGTEELLVKLNREDLLRKQRTFDNGSIPHQIHLGELHAILRRQEDFYPFLKDNREKIEKILTFRIPYYVGPLARGNSRFAWMTRKSEETITPWNFEEVVDKGASAQSFIERMTNFDKNLPNEKVLPKHSLLYEYFTVYNELTKVKYVTEGMRKPAFLSGEQKKAIVDLLFKTNRKVTVKQLKEDYFKKIECFDSVEISGVEDRFNASLGTYHDLLKIIKDKDFLDNEENEDILEDIVLTLTLFEDREMIEERLKTYAHLFDDKVMKQLKRRRYTGWGRLSRKLINGIRDKQSGKTILDFLKSDGFANRNFMQLIHDDSLTFKEDIQKAQVSGQGDSLHEHIANLAGSPAIKKGILQTVKVVDELVKVMGRHKPENIVIEMARENQTTQKGQKNSRERMKRIEEGIKELGSQILKEHPVENTQLQNEKLYLYYLQNGRDMYVDQELDINRLSDYDVDHIVPQSFLKDDSIDNKVLTRSDKNRGKSDNVPSEEVVKKMKNYWRQLLNAKLITQRKFDNLTKAERGGLSELDKAGFIKRQLVETRQITKHVAQILDSRMNTKYDENDKLIREVKVITLKSKLVSDFRKDFQFYKVREINNYHHAHDAYLNAVVGTALIKKYPKLESEFVYGDYKVYDVRKMIAKSEQEIGKATAKYFFYSNIMNFFKTEITLANGEIRKRPLIETNGETGEIVWDKGRDFATVRKVLSMPQVNIVKKTEVQTGGFSKESILPKRNSDKLIARKKDWDPKKYGGFDSPTVAYSVLVVAKVEKGKSKKLKSVKELLGITIMERSSFEKNPIDFLEAKGYKEVKKDLIIKLPKYSLFELENGRKRMLASAGELQKGNELALPSKYVNFLYLASHYEKLKGSPEDNEQKQLFVEQHKHYLDEIIEQISEFSKRVILADANLDKVLSAYNKHRDKPIREQAENIIHLFTLTNLGAPAAFKYFDTTIDRKRYTSTKEVLDATLIHQSITGLYETRIDLSQLGGDEGADKRTADGSEFESPKKKRKV

SEQ ID NO: 411 - protein, 1588 aa, Artificial Sequence
  Synthetic
MSEVEFSHEYWMRHALTLAKRARDEREVPVGAVLVLNNRVIGEGWNRAIGLHDPTAHAEIMALRQGGLVMQNYRLIDATLYSTFEPCVMCAGAMIHSRIGRVVFGVRNAKTGAAGSLMDVLHYPGMNHRVEITEGILADECAALLCYFFRMPRRVFNAQKKAQSSTDSGGSSGGSSGSETPGTSESATPESSGGSSGGSDKKYSIGLAIGTNSVGWAVITDEYKVPSKKFKVLGNTDRHSIKKNLIGALLFDSGETAEATRLKRTARRRYTRRKNRICYLQEIFSNEMAKVDDSFFHRLEESFLVEEDKKHERHPIFGNIVDEVAYHEKYPTIYHLRKKLVDSTDKADLRLIYLALAHMIKFRGHFLIEGDLNPDNSDVDKLFIQLVQTYNQLFEENPINASGVDAKAILSARLSKSRRLENLIAQLPGEKKNGLFGNLIALSLGLTPNFKSNFDLAEDAKLQLSKDTYDDDLDNLLAQIGDQYADLFLAAKNLSDAILLSDILRVNTEITKAPLSASMIKRYDEHHQDLTLLKALVRQQLPEKYKEIFFDQSKNGYAGYIDGGASQEEFYKFIKPILEKMDGTEELLVKLNREDLLRKQRTFDNGSIPHQIHLGELHAILRRQEDFYPFLKDNREKIEKILTFRIPYYVGPLARGNSRFAWMTRKSEETITPWNFEEVVDKGASAQSFIERMTNFDKNLPNEKVLPKHSLLYEYFTVYNELTKVKYVTEGMRKPAFLSGEQKKAIVDLLFKTNRKVTVKQLKEDYFKKIECFDSVEISGVEDRFNASLGTYHDLLKIIKDKDFLDNEENEDILEDIVLTLTLFEDREMIEERLKTYAHLFDDKVMKQLKRRRYTGWGRLSRKLINGIRDKQSGKTILDFLKSDGFANRNFMQLIHDDSLTFKEDIQKAQVSGQGDSLHEHIANLAGSPAIKKGILQTVKVVDELVKVMGRHKPENIVIEMARENQTTQKGQKNSRERMKRIEEGIKELGSQILKEHPVENTQLQNEKLYLYYLQNGRDMYVDQELDINRLSDYDVDHIVPQSFLKDDSIDNKVLTRSDKNRGKSDNVPSEEVVKKMKNYWRQLLNAKLITQRKFDNLTKAERGGLSELDKAGFIKRQLVETRQITKHVAQILDSRMNTKYDENDKLIREVKVITLKSKLVSDFRKDFQFYKVREINNYHHAHDAYLNAVVGTALIKKYPKLESEFVYGDYKVYDVRKMIAKSEQEIGKATAKYFFYSNIMNFFKTEITLANGEIRKRPLIETNGETGEIVWDKGRDFATVRKVLSMPQVNIVKKTEVQTGGFSKESILPKRNSDKLIARKKDWDPKKYGGFDSPTVAYSVLVVAKVEKGKSKKLKSVKELLGITIMERSSFEKNPIDFLEAKGYKEVKKDLIIKLPKYSLFELENGRKRMLASAGELQKGNELALPSKYVNFLYLASHYEKLKGSPEDNEQKQLFVEQHKHYLDEIIEQISEFSKRVILADANLDKVLSAYNKHRDKPIREQAENIIHLFTLTNLGAPAAFKYFDTTIDRKRYTSTKEVLDATLIHQSITGLYETRIDLSQLGGDEGADKRTADGSEFESPKKKRKV

SEQ ID NO: 412 - protein, 1588 aa, Artificial Sequence
  Synthetic
MSEVEFSHEYWMRHALTLAKRARDEREVPVGAVLVLNNRVIGEGWNRAIGLHDPTAHAEIMALRQGGLVMQNYRLYDATLYSTFEPCVMCAGAMIHSRIGRVVFGVRNAKTGAAGSLMDVLHHPGMNHRVEITEGILADECAALLCRFFRMPRRVFNAQKKAQSSTDSGGSSGGSSGSETPGTSESATPESSGGSSGGSDKKYSIGLAIGTNSVGWAVITDEYKVPSKKFKVLGNTDRHSIKKNLIGALLFDSGETAEATRLKRTARRRYTRRKNRICYLQEIFSNEMAKVDDSFFHRLEESFLVEEDKKHERHPIFGNIVDEVAYHEKYPTIYHLRKKLVDSTDKADLRLIYLALAHMIKFRGHFLIEGDLNPDNSDVDKLFIQLVQTYNQLFEENPINASGVDAKAILSARLSKSRRLENLIAQLPGEKKNGLFGNLIALSLGLTPNFKSNFDLAEDAKLQLSKDTYDDDLDNLLAQIGDQYADLFLAAKNLSDAILLSDILRVNTEITKAPLSASMIKRYDEHHQDLTLLKALVRQQLPEKYKEIFFDQSKNGYAGYIDGGASQEEFYKFIKPILEKMDGTEELLVKLNREDLLRKQRTFDNGSIPHQIHLGELHAILRRQEDFYPFLKDNREKIEKILTFRIPYYVGPLARGNSRFAWMTRKSEETITPWNFEEVVDKGASAQSFIERMTNFDKNLPNEKVLPKHSLLYEYFTVYNELTKVKYVTEGMRKPAFLSGEQKKAIVDLLFKTNRKVTVKQLKEDYFKKIECFDSVEISGVEDRFNASLGTYHDLLKIIKDKDFLDNEENEDILEDIVLTLTLFEDREMIEERLKTYAHLFDDKVMKQLKRRRYTGWGRLSRKLINGIRDKQSGKTILDFLKSDGFANRNFMQLIHDDSLTFKEDIQKAQVSGQGDSLHEHIANLAGSPAIKKGILQTVKVVDELVKVMGRHKPENIVIEMARENQTTQKGQKNSRERMKRIEEGIKELGSQILKEHPVENTQLQNEKLYLYYLQNGRDMYVDQELDINRLSDYDVDHIVPQSFLKDDSIDNKVLTRSDKNRGKSDNVPSEEVVKKMKNYWRQLLNAKLITQRKFDNLTKAERGGLSELDKAGFIKRQLVETRQITKHVAQILDSRMNTKYDENDKLIREVKVITLKSKLVSDFRKDFQFYKVREINNYHHAHDAYLNAVVGTALIKKYPKLESEFVYGDYKVYDVRKMIAKSEQEIGKATAKYFFYSNIMNFFKTEITLANGEIRKRPLIETNGETGEIVWDKGRDFATVRKVLSMPQVNIVKKTEVQTGGFSKESILPKRNSDKLIARKKDWDPKKYGGFDSPTVAYSVLVVAKVEKGKSKKLKSVKELLGITIMERSSFEKNPIDFLEAKGYKEVKKDLIIKLPKYSLFELENGRKRMLASAGELQKGNELALPSKYVNFLYLASHYEKLKGSPEDNEQKQLFVEQHKHYLDEIIEQISEFSKRVILADANLDKVLSAYNKHRDKPIREQAENIIHLFTLTNLGAPAAFKYFDTTIDRKRYTSTKEVLDATLIHQSITGLYETRIDLSQLGGDEGADKRTADGSEFESPKKKRKV

SEQ ID NO: 413 - protein, 1786 aa, Artificial Sequence
  Synthetic
MSEVEFSHEYWMRHALTLAKRAWDEREVPVGAVLVHNNRVIGEGWNRPIGRHDPTAHAEIMALRQGGLVMQNYRLIDATLYVTLEPCVMCAGAMIHSRIGRVVFGARDAKTGAAGSLMDVLHHPGMNHRVEITEGILADECAALLSDFFRMRRQEIKAQKKAQSSTDSGGSSGGSSGSETPGTSESATPESSGGSSGGSSEVEFSHEYWMRHALTLAKRARDEREVPVGAVLVLNNRVIGEGWNRAIGLHDPTAHAEIMALRQGGLVMQNYRLIDATLYVTFEPCVMCAGAMIHSRIGRVVFGVRNAKTGAAGSLMDVLHHPGMNHRVEITEGILADECAALLCRFFRMPRRVFNAQKKAQSSTDSGGSSGGSSGSETPGTSESATPESSGGSSGGSDKKYSIGLAIGTNSVGWAVITDEYKVPSKKFKVLGNTDRHSIKKNLIGALLFDSGETAEATRLKRTARRRYTRRKNRICYLQEIFSNEMAKVDDSFFHRLEESFLVEEDKKHERHPIFGNIVDEVAYHEKYPTIYHLRKKLVDSTDKADLRLIYLALAHMIKFRGHFLIEGDLNPDNSDVDKLFIQLVQTYNQLFEENPINASGVDAKAILSARLSKSRRLENLIAQLPGEKKNGLFGNLIALSLGLTPNFKSNFDLAEDAKLQLSKDTYDDDLDNLLAQIGDQYADLFLAAKNLSDAILLSDILRVNTEITKAPLSASMIKRYDEHHQDLTLLKALVRQQLPEKYKEIFFDQSKNGYAGYIDGGASQEEFYKFIKPILEKMDGTEELLVKLNREDLLRKQRTFDNGSIPHQIHLGELHAILRRQEDFYPFLKDNREKIEKILTFRIPYYVGPLARGNSRFAWMTRKSEETITPWNFEEVVDKGASAQSFIERMTNFDKNLPNEKVLPKHSLLYEYFTVYNELTKVKYVTEGMRKPAFLSGEQKKAIVDLLFKTNRKVTVKQLKEDYFKKIECFDSVEISGVEDRFNASLGTYHDLLKIIKDKDFLDNEENEDILEDIVLTLTLFEDREMIEERLKTYAHLFDDKVMKQLKRRRYTGWGRLSRKLINGIRDKQSGKTILDFLKSDGFANRNFMQLIHDDSLTFKEDIQKAQVSGQGDSLHEHIANLAGSPAIKKGILQTVKVVDELVKVMGRHKPENIVIEMARENQTTQKGQKNSRERMKRIEEGIKELGSQILKEHPVENTQLQNEKLYLYYLQNGRDMYVDQELDINRLSDYDVDHIVPQSFLKDDSIDNKVLTRSDKNRGKSDNVPSEEVVKKMKNYWRQLLNAKLITQRKFDNLTKAERGGLSELDKAGFIKRQLVETRQITKHVAQILDSRMNTKYDENDKLIREVKVITLKSKLVSDFRKDFQFYKVREINNYHHAHDAYLNAVVGTALIKKYPKLESEFVYGDYKVYDVRKMIAKSEQEIGKATAKYFFYSNIMNFFKTEITLANGEIRKRPLIETNGETGEIVWDKGRDFATVRKVLSMPQVNIVKKTEVQTGGFSKESILPKRNSDKLIARKKDWDPKKYGGFDSPTVAYSVLVVAKVEKGKSKKLKSVKELLGITIMERSSFEKNPIDFLEAKGYKEVKKDLIIKLPKYSLFELENGRKRMLASAGELQKGNELALPSKYVNFLYLASHYEKLKGSPEDNEQKQLFVEQHKHYLDEIIEQISEFSKRVILADANLDKVLSAYNKHRDKPIREQAENIIHLFTLTNLGAPAAFKYFDTTIDRKRYTSTKEVLDATLIHQSITGLYETRIDLSQLGGDEGADKRTADGSEFESPKKKRKV

SEQ ID NO: 414 - protein, 1786 aa, Artificial Sequence
  Synthetic
MSEVEFSHEYWMRHALTLAKRAWDEREVPVGAVLVHNNRVIGEGWNRPIGRHDPTAHAEIMALRQGGLVMQNYRLIDATLYVTLEPCVMCAGAMIHSRIGRVVFGARDAKTGAAGSLMDVLHHPGMNHRVEITEGILADECAALLSDFFRMRRQEIKAQKKAQSSTDSGGSSGGSSGSETPGTSESATPESSGGSSGGSSEVEFSHEYWMRHALTLAKRARDEREVPVGAVLVLNNRVIGEGWNRAIGLHDPTAHAEIMALRQGGLVMQNYRLIDATLYSTFEPCVMCAGAMIHSRIGRVVFGVRNAKTGAAGSLMDVLHYPGMNHRVEITEGILADECAALLCYFFRMPRRVFNAQKKAQSSTDSGGSSGGSSGSETPGTSESATPESSGGSSGGSDKKYSIGLAIGTNSVGWAVITDEYKVPSKKFKVLGNTDRHSIKKNLIGALLFDSGETAEATRLKRTARRRYTRRKNRICYLQEIFSNEMAKVDDSFFHRLEESFLVEEDKKHERHPIFGNIVDEVAYHEKYPTIYHLRKKLVDSTDKADLRLIYLALAHMIKFRGHFLIEGDLNPDNSDVDKLFIQLVQTYNQLFEENPINASGVDAKAILSARLSKSRRLENLIAQLPGEKKNGLFGNLIALSLGLTPNFKSNFDLAEDAKLQLSKDTYDDDLDNLLAQIGDQYADLFLAAKNLSDAILLSDILRVNTEITKAPLSASMIKRYDEHHQDLTLLKALVRQQLPEKYKEIFFDQSKNGYAGYIDGGASQEEFYKFIKPILEKMDGTEELLVKLNREDLLRKQRTFDNGSIPHQIHLGELHAILRRQEDFYPFLKDNREKIEKILTFRIPYYVGPLARGNSRFAWMTRKSEETITPWNFEEVVDKGASAQSFIERMTNFDKNLPNEKVLPKHSLLYEYFTVYNELTKVKYVTEGMRKPAFLSGEQKKAIVDLLFKTNRKVTVKQLKEDYFKKIECFDSVEISGVEDRFNASLGTYHDLLKIIKDKDFLDNEENEDILEDIVLTLTLFEDREMIEERLKTYAHLFDDKVMKQLKRRRYTGWGRLSRKLINGIRDKQSGKTILDFLKSDGFANRNFMQLIHDDSLTFKEDIQKAQVSGQGDSLHEHIANLAGSPAIKKGILQTVKVVDELVKVMGRHKPENIVIEMARENQTTQKGQKNSRERMKRIEEGIKELGSQILKEHPVENTQLQNEKLYLYYLQNGRDMYVDQELDINRLSDYDVDHIVPQSFLKDDSIDNKVLTRSDKNRGKSDNVPSEEVVKKMKNYWRQLLNAKLITQRKFDNLTKAERGGLSELDKAGFIKRQLVETRQITKHVAQILDSRMNTKYDENDKLIREVKVITLKSKLVSDFRKDFQFYKVREINNYHHAHDAYLNAVVGTALIKKYPKLESEFVYGDYKVYDVRKMIAKSEQEIGKATAKYFFYSNIMNFFKTEITLANGEIRKRPLIETNGETGEIVWDKGRDFATVRKVLSMPQVNIVKKTEVQTGGFSKESILPKRNSDKLIARKKDWDPKKYGGFDSPTVAYSVLVVAKVEKGKSKKLKSVKELLGITIMERSSFEKNPIDFLEAKGYKEVKKDLIIKLPKYSLFELENGRKRMLASAGELQKGNELALPSKYVNFLYLASHYEKLKGSPEDNEQKQLFVEQHKHYLDEIIEQISEFSKRVILADANLDKVLSAYNKHRDKPIREQAENIIHLFTLTNLGAPAAFKYFDTTIDRKRYTSTKEVLDATLIHQSITGLYETRIDLSQLGGDEGADKRTADGSEFESPKKKRKV

SEQ ID NO: 415 - protein, 1786 aa, Artificial Sequence
  Synthetic
MSEVEFSHEYWMRHALTLAKRAWDEREVPVGAVLVHNNRVIGEGWNRPIGRHDPTAHAEIMALRQGGLVMQNYRLIDATLYVTLEPCVMCAGAMIHSRIGRVVFGARDAKTGAAGSLMDVLHHPGMNHRVEITEGILADECAALLSDFFRMRRQEIKAQKKAQSSTDSGGSSGGSSGSETPGTSESATPESSGGSSGGSSEVEFSHEYWMRHALTLAKRARDEREVPVGAVLVLNNRVIGEGWNRAIGLHDPTAHAEIMALRQGGLVMQNYRLYDATLYSTFEPCVMCAGAMIHSRIGRVVFGVRNAKTGAAGSLMDVLHHPGMNHRVEITEGILADECAALLCRFFRMPRRVFNAQKKAQSSTDSGGSSGGSSGSETPGTSESATPESSGGSSGGSDKKYSIGLAIGTNSVGWAVITDEYKVPSKKFKVLGNTDRHSIKKNLIGALLFDSGETAEATRLKRTARRRYTRRKNRICYLQEIFSNEMAKVDDSFFHRLEESFLVEEDKKHERHPIFGNIVDEVAYHEKYPTIYHLRKKLVDSTDKADLRLIYLALAHMIKFRGHFLIEGDLNPDNSDVDKLFIQLVQTYNQLFEENPINASGVDAKAILSARLSKSRRLENLIAQLPGEKKNGLFGNLIALSLGLTPNFKSNFDLAEDAKLQLSKDTYDDDLDNLLAQIGDQYADLFLAAKNLSDAILLSDILRVNTEITKAPLSASMIKRYDEHHQDLTLLKALVRQQLPEKYKEIFFDQSKNGYAGYIDGGASQEEFYKFIKPILEKMDGTEELLVKLNREDLLRKQRTFDNGSIPHQIHLGELHAILRRQEDFYPFLKDNREKIEKILTFRIPYYVGPLARGNSRFAWMTRKSEETITPWNFEEVVDKGASAQSFIERMTNFDKNLPNEKVLPKHSLLYEYFTVYNELTKVKYVTEGMRKPAFLSGEQKKAIVDLLFKTNRKVTVKQLKEDYFKKIECFDSVEISGVEDRFNASLGTYHDLLKIIKDKDFLDNEENEDILEDIVLTLTLFEDREMIEERLKTYAHLFDDKVMKQLKRRRYTGWGRLSRKLINGIRDKQSGKTILDFLKSDGFANRNFMQLIHDDSLTFKEDIQKAQVSGQGDSLHEHIANLAGSPAIKKGILQTVKVVDELVKVMGRHKPENIVIEMARENQTTQKGQKNSRERMKRIEEGIKELGSQILKEHPVENTQLQNEKLYLYYLQNGRDMYVDQELDINRLSDYDVDHIVPQSFLKDDSIDNKVLTRSDKNRGKSDNVPSEEVVKKMKNYWRQLLNAKLITQRKFDNLTKAERGGLSELDKAGFIKRQLVETRQITKHVAQILDSRMNTKYDENDKLIREVKVITLKSKLVSDFRKDFQFYKVREINNYHHAHDAYLNAVVGTALIKKYPKLESEFVYGDYKVYDVRKMIAKSEQEIGKATAKYFFYSNIMNFFKTEITLANGEIRKRPLIETNGETGEIVWDKGRDFATVRKVLSMPQVNIVKKTEVQTGGFSKESILPKRNSDKLIARKKDWDPKKYGGFDSPTVAYSVLVVAKVEKGKSKKLKSVKELLGITIMERSSFEKNPIDFLEAKGYKEVKKDLIIKLPKYSLFELENGRKRMLASAGELQKGNELALPSKYVNFLYLASHYEKLKGSPEDNEQKQLFVEQHKHYLDEIIEQISEFSKRVILADANLDKVLSAYNKHRDKPIREQAENIIHLFTLTNLGAPAAFKYFDTTIDRKRYTSTKEVLDATLIHQSITGLYETRIDLSQLGGDEGADKRTADGSEFESPKKKRKV
